(19) United States
(12) Patent Application Publication
(10) Pub. No.: US 2025/0066759 A1
(43) Pub. Date: Feb. 27, 2025

(54) FUSION PROTEINS FOR PURIFYING NUCLEIC ACIDS

(71) Applicant: Donaldson Company, Inc., Bloomington, MN (US)

(72) Inventors: Michael DZURICKY, Durham, NC (US); Kelli M. LUGINBUHL, Durham, NC (US); James MCGUINESS, Bloomington, MN (US)

(21) Appl. No.: 18/813,397

(22) Filed: Aug. 23, 2024

Related U.S. Application Data
(60) Provisional application No. 63/554,715, filed on Feb. 16, 2024.
(60) Provisional application No. 63/578,551, filed on Aug. 24, 2023.

(51) Int. Cl. C12N 15/10; C07K 14/32

(52) U.S. Cl. CPC C12N 15/101; C07K 14/32; C07K 2319/85

(57) ABSTRACT

Provided herein are fusion proteins and methods of use thereof to purify nucleic acids from a composition. The disclosed compositions and methods allow for faster, more efficient purification of nucleic acids compared to traditional affinity chromatography.

### CROSS REFERENCE TO RELATED APPLICATIONS

[0001] This application claims priority to U.S. Application No. 63/578,551 filed on Aug. 24, 2023, and U.S. Application No. 63/554,715 filed on Feb. 16, 2024, the contents of which is incorporated by reference herein in its entirety for all purposes.

### REFERENCE TO AN ELECTRONIC SEQUENCE LISTING

[0002] The contents of the electronic sequence listing (ISOL_011_02US_SeqList_ST26.xml; Size: 1,566,780 bytes; and Date of Creation: Aug. 21, 2024) are herein incorporated by reference in its entirety.

### FIELD

[0003] The present disclosure is generally related to fusion proteins, compositions containing fusion proteins, and methods of using fusion proteins for purification of nucleic acids.

### BACKGROUND

[0004] The use of nucleic acids as therapeutics is rapidly increasing, as highlighted by the mRNA-based vaccines against SARS-CoV-2. Purification of nucleic acids like mRNA is challenging because mRNAs are large molecules, much bigger than proteins. As a result of its large size, mRNA does not interact well with convention affinity chromatography resins. Additionally, the impurity profile of nucleic acid compositions is often complex and it is difficult to find a purification platform that can remove all contaminants from the compositions.

[0005] There is a need in the art for improved compositions and methods for rapidly and cost-effectively purifying nucleic acids like mRNA.

### SUMMARY

[0006] The present disclosure provides fusion proteins containing nucleic acid binding proteins and methods of using the same for purifying nucleic acids, and methods for using the same.

[0007] Provided herein are compositions comprising a fusion protein. In embodiments, the fusion protein comprises a nucleic acid binding protein (NBP) and a polypeptide with phase behavior. In embodiments, the NBP is selected from any one of: RNA-specific adenosine deaminase 1 (ADAR1), ADAR1 double stranded RNA-binding domain 3 (dsRBD3), Bacillus subtilis cold shock protein B (Bs-CspB), cold shock domain Y-box protein (CSD-Ybox), eukaryotic translation initiation factor 4E (eIF4e), Fox-1 protein (FOX1), heterogenous nuclear ribonucleoprotein Q1 (hnRNPQ1), Homo sapiens zinc finger CCCH-Type containing 14 (HsZC3H14), polyA-binding protein (PABP), polyA-binding protein nuclear 1 (PABPN1), pentatricopeptide repeat protein A (PPRpA), Pumilio-like repeat protein A (PUFpA), Staufen, 12-O-tetradecanoylphorbol-13-acetate inducible sequence 11 D (TIS11D), Z-DNA/RNA binding protein 1 (ZBP1), and Zinc Finger Nuclease (ZNF). In embodiments, the NBP has an amino acid sequence with at least 80%, at least 81%, at least 82%, at least 83%, at least 84%, at least 85%, at least 86%, at least 87%, at least 88%, at least 89%, at least 90%, at least 91%, at least 92%, at least 93%, at least 94%, at least 95%, at least 96%, at least 97%, at least 98%, at least 99 or 100% identity to a polypeptide of any one of SEQ ID NOS: 61-103. In embodiments, the NBP is selected from any one of: ADAR1 double stranded RNA-binding domain 3 (dsRBD3), heterogenous nuclear ribonucleoprotein Q1 (hnRNPQ1), Homo sapiens zinc finger CCCH-Type containing 14 (HsZC3H14), polyA-binding protein nuclear 1 (PABPN1), pentatricopeptide repeat protein A (PPRpA), and Pumilio-like repeat protein A (PUFpA). In embodiments, the NBP has an amino acid sequence with at least 80%, at least 81%, at least 82%, at least 83%, at least 84%, at least 85%, at least 86%, at least 87%, at least 88%, at least 89%, at least 90%, at least 91%, at least 92%, at least 93%, at least 94%, at least 95%, at least 96%, at least 97%, at least 98%, at least 99%, or 100% identity to a polypeptide of any one of SEQ ID NOS: 89, 93, 95, or 97-99. In embodiments, the polypeptide with phase behavior has at least 80%, at least 81%, at least 82%, at least 83%, at least 84%, at least 85%, at least 86%, at least 87%, at least 88%, at least 89%, at least 90%, at least 91%, at least 92%, at least 93%, at least 94%, at least 95%, at least 96%, at least 97%, at least 98%, at least 99%, or 100% identity to a polypeptide of any one of SEQ ID NOS: 1-60 or 217. In embodiments, the polypeptide with phase behavior has at least 80%, at least 81%, at least 82%, at least 83%, at least 84%, at least 85%, at least 86%, at least 87%, at least 88%, at least 89%, at least 90%, at least 91%, at least 92%, at least 93%, at least 94%, at least 95%, at least 96%, at least 97%, at least 98%, at least 99%, or 100% identity to a polypeptide of any one of SEQ ID NOS: 57 or 60.

[0008] In embodiments, the fusion protein comprises a linker. In embodiments, the linker has an amino acid sequence with at least 80%, at least 81%, at least 82%, at least 83%, at least 84%, at least 85%, at least 86%, at least 87%, at least 88%, at least 89%, at least 90%, at least 91%, at least 92%, at least 93%, at least 94%, at least 95%, at least 96%, at least 97%, at least 98%, at least 99%, or 100% identity to a polypeptide of any one of SEQ ID NOS: 143-216.

[0009] In embodiments, the NBP binds to RNA, DNA, or both. In embodiments, the NBP binds to RNA selected from any one of double stranded RNA (dsRNA), single stranded RNA (ssRNA), mRNA, pre-mRNA, polyadenosine (polyA) RNA, Z-confirmation RNA (Z-RNA), or a combination thereof. In embodiments, the NBP binds to the 3′-terminus of mRNA, the 3′-terminus of mRNA, a 3′ untranslated region (UTR) of mRNA, a polyA tail of mRNA, or an AU-rich element, or combination thereof, of mRNA. In embodiments, the NBP binds to a pre-mRNA. In embodiments, the NBP binds to an intron, exon, polyA tail, or combination thereof, of the pre-mRNA. In embodiments, the NBP binds to DNA. In embodiments, the NBP binds to single stranded DNA, double stranded DNA, polyadenosine (polyA) DNA, Z-conformation DNA (Z-DNA), or a combination thereof.

[0010] In embodiments, the fusion protein is encoded by a nucleic acid. In embodiments, the nucleic acid has a sequence with at least 80%, at least 81%, at least 82%, at least 83%, at least 84%, at least 85%, at least 86%, at least 87%, at least 88%, at least 89%, at least 90%, at least 91%, at least 92%, at least 93%, at least 94%, at least 95%, at least 96%, at least 97%, at least 98%, at least 99%, or 100% identity to a nucleic acid of any one of SEQ ID NOS: 119-133. In embodiments, the fusion protein is encoded by a vector. In embodiments, the vector comprises a nucleic acid sequence, wherein the nucleic acid has a sequence with at least 80%, at least 81%, at least 82%, at least 83%, at least 84%, at least 85%, at least 86%, at least 87%, at least 88%, at least 89%, at least 90%, at least 91%, at least 92%, at least 93%, at least 94%, at least 95%, at least 96%, at least 97%, at least 98%, at least 99%, or 100% identity to a nucleic acid of any one of SEQ ID NOS: 119-133. In embodiments, the vector has at least 80%, at least 81%, at least 82%, at least 83%, at least 84%, at least 85%, at least 86%, at least 87%, at least 88%, at least 89%, at least 90%, at least 91%, at least 92%, at least 93%, at least 94%, at least 95%, at least 96%, at least 97%, at least 98%, at least 99%, or 100% identity to a nucleic acid of any one of SEQ ID NOS: 104-118, 134, and 135.

[0011] Provided herein are methods of purifying a nucleic acid, comprising (i) contacting a composition comprising the nucleic acid and at least one contaminant with a fusion protein of the disclosure, wherein the fusion protein binds to the nucleic acid to form a complex; (ii) contacting the complex with a first environmental factor to increase the size of the complex; (iii) separating the complex from at least one contaminant; and (iv) separating the nucleic acid from the fusion protein by contacting the complex with a second environmental factor. In embodiments, the complex is separated from the at least one contaminant on the basis of size. In embodiments, the separation on the basis of size is performed using any one of the methods selected from tangential flow filtration, membrane chromatography, analytical ultracentrifugation, high performance liquid chromatography, membrane chromatography, normal flow filtration, acoustic wave separation, centrifugation, counterflow centrifugation, and fast protein liquid chromatography. In embodiments, the first environmental factor comprises one or more of: (a) a change in one or more of temperature, pH, salt concentration, concentration of the purification matrix, concentration of the viral particle, or pressure; (b) the addition of one or more surfactants, cofactor, vitamin, molecular crowding agents, reducing agents, oxidizing agents, enzymes, or denaturing agents; or (c) the application of electromagnetic or acoustic waves. In embodiments, the second environmental factor comprises one or more of: (a) a change in one or more of temperature, pH, salt concentration, concentration of the purification matrix, concentration of the viral particle, or pressure; (b) the addition of one or more surfactants, cofactor, vitamin, molecular crowding agents, reducing agents, oxidizing agents, enzymes, or denaturing agents; or (c) the application of electromagnetic or acoustic waves. In embodiments, the at least one contaminant is selected from a solvent, a protein, a peptide, a carbohydrate, a nucleic acid, a virus, a cell (e.g., a bacterial, yeast, or mammalian cell), a carbohydrate, a lipid, or a lipopolysaccharide.

[0012] Provided herein is a fusion protein comprising a Bacillus subtilis cold shock protein B (Bs-CspB) and a polypeptide with phase behavior. In embodiments, the Bs-CspB has an amino acid sequence with at least 80%, at least 81%, at least 82%, at least 83%, at least 84%, at least 85%, at least 86%, at least 87%, at least 88%, at least 89%, at least 90%, at least 91%, at least 92%, at least 93%, at least 94%, at least 95%, at least 96%, at least 97%, at least 98%, at least 99%, or 100% identity to a polypeptide of SEQ ID NO: 90. In embodiments, the polypeptide with phase behavior comprises a P and G motif, comprising a plurality of proline residues and a plurality of glycine residues. In embodiments, the P and G motif comprises at least about 10% proline residues and at least about 20% glycine residues. In embodiments, the polypeptide with phase behavior comprises pentapeptide repeat having the sequence (Val-Pro-Gly-Xaa-Gly)n (SEQ ID NO: 217), or a randomized, scrambled analog thereof; wherein Xaa can be any amino acid except proline. In embodiments, n is an integer from 1 to 360, inclusive of endpoints. In embodiments, the polypeptide with phase behavior comprises an amino acid sequence selected from: a. (GRGDSPY)n (SEQ ID NO: 1); b. (GRGDSPH)n (SEQ ID NO: 2); c. (GRGDSPV)n (SEQ ID NO: 3); d. (GRGDSPYG)n (SEQ ID NO: 4); e. (RPLGYDS)n (SEQ ID NO: 5); f. (RPAGYDS)n (SEQ ID NO: 6); g. (GRGDSYP)n (SEQ ID NO: 7); h. (GRGDSPYQ)n (SEQ ID NO: 8); i. (GRGNSPYG)n (SEQ ID NO: 9); j. (GVGVP)n (SEQ ID NO: 10); k. (GVGVPGLGVPGVGVPGLGVPGVGVP)m (SEQ ID NO: 11); l. (GVGVPGVGVPGAGVPGVGVPGVGVP)m (SEQ ID NO: 12); m. (GVGVPGWGVPGVGVPGWGVPGVGVP)m (SEQ ID NO: 13); n. (GVGVPGVGVPGVGVPGVGVPGVGVPGVGVPGEGVPGFGVPGVGVP)m (SEQ ID NO: 14); o. (GVGVPGVGVPGVGVPGVGVPGVGVPGVGVPGKGVPGFGVPGVGVP)m (SEQ ID NO: 15); and p. (GAGVPGVGVPGAGVPGVGVPGAGVP)m (SEQ ID NO: 16); or a randomized, scrambled analog thereof; wherein: n is an integer in the range of 20-360, inclusive of endpoints; and m is an integer in the range of 4-25, inclusive of endpoints. In embodiments, the polypeptide with phase behavior comprises an amino acid sequence selected from: a. (GVGVP)m (SEQ ID NO: 22); b. (ZZPXXXXGZ)m (SEQ ID NO: 23); c. (ZZPXGZ)m (SEQ ID NO: 24); d. (ZZPXXGZ)m (SEQ ID NO: 25); or e. (ZZPXXXGZ)m (SEQ ID NO: 26), wherein m is an integer between 10 and 160, inclusive of endpoints, wherein X if present is any amino acid except proline or glycine, and wherein Z if present is any amino acid.

[0013] In embodiments, the polypeptide with phase behavior comprises an amino acid sequence selected from: a. (GVGVPGVGVPGAGVPGVGVPGVGVP)m (SEQ ID NO: 17); or b. (GVGVPGVGVPGLGVPGVGVPGVGVP)m (SEQ ID NO: 18); wherein m is an integer between 2 and 32, inclusive of endpoints. In embodiments, the polypeptide with phase behavior comprises an amino acid sequence selected from: a. (GVGVPGVGVPGAGVPGVGVPGVGVP)m (SEQ ID NO: 19), wherein m is 8 or 16; b. (GVGVPGAGVP)m (SEQ ID NO: 20), wherein m is an integer between 5 and 80, inclusive of endpoints; or c. (GXGVP)m (SEQ ID NO: 21), wherein m is an integer between 10 and 160, inclusive of endpoints, and wherein X for each repeat is independently selected from the group consisting of glycine, alanine, valine, isoleucine, leucine, phenylalanine, tyrosine, tryptophan, lysine, arginine, aspartic acid, glutamic acid, and serine. In embodiments, the polypeptide with phase behavior has at least 80%, at least 81%, at least 82%, at least 83%, at least 84%, at least 85%, at least 86%, at least 87%, at least 88%, at least 89%, at least 90%, at least 91%, at least 92%, at least 93%, at least 94%, at least 95%, at least 96%, at least 97%, at least 98%, at least 99%, or 100% identity to a polypeptide of any one of SEQ ID NOS: 1-60, 217, or 262-264. In embodiments, the polypeptide with phase behavior has at least 80%, at least 81%, at least 82%, at least 83%, at least 84%, at least 85%, at least 86%, at least 87%, at least 88%, at least 89%, at least 90%, at least 91%, at least 92%, at least 93%, at least 94%, at least 95%, at least 96%, at least 97%, at least 98%, at least 99%, or 100% identity to a polypeptide of any one of SEQ ID NOs: 56, or 262-264. In embodiments, the polypeptide with phase behavior has at least 80%, at least 81%, at least 82%, at least 83%, at least 84%, at least 85%, at least 86%, at least 87%, at least 88%, at least 89%, at least 90%, at least 91%, at least 92%, at least 93%, at least 94%, at least 95%, at least 96%, at least 97%, at least 98%, at least 99%, or 100% identity to a polypeptide of SEQ ID NO: 56. In embodiments, the fusion protein has at least 90% identity to a polypeptide of SEQ ID NO: 90 and at least 90% identity to a polypeptide of any one of SEQ ID NOs: 56, and 262-264. In embodiments, the fusion protein has at least 90% identity to a polypeptide of SEQ ID NO: 90 and at least 90% identity to a polypeptide of SEQ ID NO: 56.

[0014] In embodiments, the fusion protein comprising a linker. In embodiments, the linker has an amino acid sequence with at least 80%, at least 81%, at least 82%, at least 83%, at least 84%, at least 85%, at least 86%, at least 87%, at least 88%, at least 89%, at least 90%, at least 91%, at least 92%, at least 93%, at least 94%, at least 95%, at least 96%, at least 97%, at least 98%, at least 99%, or 100% identity to a polypeptide of any one of SEQ ID NOS: 143-216, or 261. In embodiments, the linker has an amino acid sequence with at least 80%, at least 81%, at least 82%, at least 83%, at least 84%, at least 85%, at least 86%, at least 87%, at least 88%, at least 89%, at least 90%, at least 91%, at least 92%, at least 93%, at least 94%, at least 95%, at least 96%, at least 97%, at least 98%, at least 99%, or 100% identity to a polypeptide of SEQ ID NO: 261. In embodiments, the fusion protein has an amino acid sequence with at least 80%, at least 81%, at least 82%, at least 83%, at least 84%, at least 85%, at least 86%, at least 87%, at least 88%, at least 89%, at least 90%, at least 91%, at least 92%, at least 93%, at least 94%, at least 95%, at least 96%, at least 97%, at least 98%, at least 99%, or 100% identity to a polypeptide of any one of SEQ ID NOs: 225 or 226.

[0015] In embodiments, the fusion protein has at least 90% identity to a polypeptide of SEQ ID NO: 225 or 226. In embodiments, the Bs-CspB binds to RNA, DNA, or both. In embodiments, the Bs-CspB binds to RNA, DNA, or both. In embodiments, the Bs-CspB binds to ssRNA. In embodiments, the Bs-CspB binds to a 3′-terminus of the mRNA, a 5′-terminus of the mRNA, a coding region of the mRNA, a non-coding region of the mRNA, or a combination thereof. In embodiments, the Bs-CspB binds to a pre-mRNA. In embodiments, the Bs-CspB binds to an intron, an exon, a 5′ UTR, a 3′ UTR, or a combination thereof, of the pre-mRNA. In embodiments, the Bs-CspB binds to DNA. In embodiments, the Bs-CspB binds to single stranded DNA, double stranded DNA, polyadenosine (polyA) DNA, Z-conformation DNA (Z-DNA), or a combination thereof.

[0016] Provided herein is a nucleic acid encoding the fusion protein. In embodiments, the nucleic acid has a sequence with at least 80%, at least 81%, at least 82%, at least 83%, at least 84%, at least 85%, at least 86%, at least 87%, at least 88%, at least 89%, at least 90%, at least 91%, at least 92%, at least 93%, at least 94%, at least 95%, at least 96%, at least 97%, at least 98%, at least 99%, or 100% identity to a nucleic acid of any one of SEQ ID NOS: 119-133.

[0017] Provided herein is a vector encoding a fusion protein. Provided herein is a vector comprising the nucleic acid. Provided herein is a vector having at least 80%, at least 81%, at least 82%, at least 83%, at least 84%, at least 85%, at least 86%, at least 87%, at least 88%, at least 89%, at least 90%, at least 91%, at least 92%, at least 93%, at least 94%, at least 95%, at least 96%, at least 97%, at least 98%, at least 99%, or 100% identity to a nucleic acid any one of SEQ ID NOS: 104-118, 134, and 135.

[0018] Provided herein is a method of purifying a single stranded nucleic acid comprising: (i) contacting a composition comprising the single stranded nucleic acid and at least one contaminant with a fusion protein of any one of claims 1-28, wherein the fusion protein binds to the single stranded nucleic acid to form a complex; (ii) adding to the composition comprising the complex a first environmental factor, thereby increasing the size of the complex; (iii) separating the complex from at least one contaminant; and (iv) separating the single stranded nucleic acid from the fusion protein by contacting the complex with a second environmental factor, thereby forming a product comprising the single stranded nucleic acid. In embodiments, the single stranded nucleic acid comprises ssRNA. In embodiments, the complex is separated from the at least one contaminant on the basis of size. In embodiments, the separation on the basis of size is performed using a method selected from any one of tangential flow filtration, membrane chromatography, analytical ultracentrifugation, high performance liquid chromatography, normal flow filtration, acoustic wave separation, centrifugation, counterflow centrifugation, and fast protein liquid chromatography. In embodiments, the separation on the basis of size is performed using a method comprising centrifugation. In embodiments, the first environmental factor comprises one or more of: (a) a change in one or more of temperature, pH, salt concentration, concentration of the purification matrix, concentration of the viral particle, or pressure; (b) the addition of one or more surfactants, cofactor, vitamin, molecular crowding agents, reducing agents, oxidizing agents, enzymes, or denaturing agents; or (c) the application of electromagnetic or acoustic waves. In embodiments, the second environmental factor comprises one or more of: (a) a change in one or more of temperature, pH, salt concentration, concentration of the purification matrix, concentration of the viral particle, or pressure; (b) the addition of one or more surfactants, cofactor, vitamin, molecular crowding agents, reducing agents, oxidizing agents, enzymes, or denaturing agents; or (c) the application of electromagnetic or acoustic waves. In embodiments, the at least one contaminant is selected from a solvent, a protein, a peptide, a carbohydrate, double stranded nucleic acid, a virus, a cell (e.g., a bacterial, yeast, or mammalian cell), a carbohydrate, a lipid, or a lipopolysaccharide. In embodiments, the at least one contaminant is a double stranded nucleic acid. In embodiments, the double stranded nucleic acid is dsRNA. In embodiments, the salt is added at a concentration comprising about 0.5 M to about 3 M. In embodiments, the salt is added at a concentration comprising about 1.2 M to about 1.7 M. In embodiments, the product comprises about 70% to about 100% of the single stranded nucleic acid based on the total nucleic acid content in the product of step (iv). In embodiments, the single stranded nucleic acid comprises ssRNA. In embodiments, the product comprises about 10% or less of the at least one contaminant based on the total nucleic acid content in the product. In embodiments, the at least one contaminant comprises dsRNA. In embodiments, the purification method comprises at least about a 1-log removal of a contaminant compared to the amount of the contaminant in the composition of step (i). In embodiments, the purification method comprises a 1 to 10-log removal of a contaminant compared to the amount of the contaminant in the composition of step (i). In embodiments, in step (i), the fusion protein is present at a concentration of about 1 μM to about 200 μM. In embodiments, in step (i), the fusion protein is present at a concentration of about 30 μM to about 60 μM.

### BRIEF DESCRIPTION OF THE DRAWINGS

[0019] The accompanying figures, which are incorporated herein and form a part of the specification, illustrate some, but not the only or exclusive, example embodiments and/or features. It is intended that the embodiments and figures disclosed herein are to be considered illustrative rather than limiting.

[0020] FIG. 1 shows a comparison of non-specific binding among various polypeptides with phase behavior to RNA templates of varying length and strandedness and linearized plasmid DNA using agarose gel electrophoresis. Successful binding of the nucleic acid species by the biopolymer is indicated as retention within the well. The polypeptide with phase behavior 40L80 (SEQ ID NO: 264) demonstrated non-specific binding to a broad range of nucleic acid species.

[0021] FIG. 2 shows the percent elution of total RNA captured directly using an ssRNA purification reagent comprising a fusion protein (SEQ ID NO: 225) containing Bs-CspB (SEQ ID NO: 90) and a polypeptide with phase behavior, referred to as 100V80 (SEQ ID NO: 56), from in vitro transcription (IVT) reactions separately transcribing a range of mRNA template sizes. The percent elution reflects the final yield post-elution compared to total RNA present in the initial IVT reaction.

[0022] FIGS. 3A and 3B shows that the ssRNA purification reagent comprising Bs-CspB and 100V80 is highly selective for ssRNA. FIG. 3A shows the Log₁₀ removal value (LRV) of dsRNA during RNA captures of purified RNA with spiked in dsRNA across a range of ssRNA purification reagent:RNA molar ratios. The reagent retained selectivity for ssRNA and was capable of greater than 4-log removal of dsRNA. FIG. 3B shows the percent elution of total dsRNA across samples with a range of percent spiked dsRNA. Despite spiking in dsRNA at values as high as 10% of the total RNA, selectivity was retained in captures performed on purified RNA.

[0023] FIG. 4 shows a screen of ssRNA binding candidates for their ability to capture a broad range of ssRNA templates and dsRNA targets in independent capture reactions using agarose gel electrophoresis. The fusion protein comprising Bs-CspB and 100V80 selectively captured a board range of ssRNA templates. The presence of a band indicates uncaptured nucleic acids.

### DETAILED DESCRIPTION OF THE INVENTION

### Definitions

[0024] As used herein, and in the appended claims, the singular forms “a”, “an”, and “the” include plural referents unless the context clearly dictates otherwise. Thus, for example, reference to “a protein” can refer to one protein or to mixtures of such protein, and reference to “the method” includes reference to equivalent steps and/or methods known to those skilled in the art, and so forth.

[0025] As used herein, the term “about” or “approximately” when preceding a numerical value indicates the value plus or minus a range of 10%. For example, “about 100” encompasses 90 and 110.

[0026] Also as used herein, “and/or” refers to and encompasses any and all possible combinations of one or more of the associated listed items, as well as the lack of combinations when interpreted in the alternative (“or”).

[0027] Unless the context indicates otherwise, it is specifically intended that the various features described herein can be used in any combination.

[0028] Moreover, the present disclosure also contemplates that in some embodiments, any feature or combination of features set forth herein can be excluded or omitted. To illustrate further, if, for example, the specification indicates that a particular amino acid can be selected from A, G, I, L and/or V, this language also indicates that the amino acid can be selected from any subset of these amino acid(s) for example A, G, I or L; A, G, I or V; A or G; only L; etc., as if each such subcombination is expressly set forth herein. Moreover, such language also indicates that one or more of the specified amino acids can be disclaimed. For example, in particular embodiments the amino acid is not A, G or I; is not A; is not G or V; etc., as if each such possible disclaimer is expressly set forth herein.

[0029] As used herein, the term “environmental factor” is any factor that, when applied to a composition comprising a fusion protein, alters one or more properties of the composition. Non-limiting examples of environmental factors include a change in one or more of temperature, pH, salt concentration, concentration of the fusion protein, concentration of the nucleic acid, or pressure; the addition of one or more surfactants, molecular crowding agents, denaturing agents, reducing agents, or oxidizing agents; or the application of electromagnetic or acoustic waves.

[0030] As used herein, the term “contaminant” may refer to any substance that is not desired in a purified composition. In embodiments, the contaminant is any substance other than the nucleic acid desired to be purified. Non-limiting examples of contaminants include, but are not limited to, a solvent, a protein, a peptide, a carbohydrate, a nucleic acid, a virus, a cell (e.g., a bacterial, yeast, or mammalian cell), a carbohydrate, a lipid, or a lipopolysaccharide. In embodiments, the contaminant is an endotoxin or a mycotoxin. In embodiments, a the cell is an immune cell. In embodiments, the immune cell is a T cell, a B cell, a NK cell, a peripheral blood mononuclear cell, monocyte, macrophage, or a neutrophil. In embodiments, the cell is a T cell expressing a chimeric antigen receptor (CAR). In embodiment, the contaminant is double stranded nucleic acid.

[0031] As used herein, the terms “peptide,” “polypeptide,” and “protein” are used interchangeably, and refer to a compound comprised of amino acid residues covalently linked by peptide bonds. A protein must contain at least two amino acids, and no limitation is placed on the maximum number of amino acids that can comprise a protein's sequence. The term “peptide” may refer to a short chain of amino acids including, for example, natural peptides, recombinant peptides, synthetic peptides, or a combination thereof. Proteins and peptides may include, for example, biologically active fragments, substantially homologous polypeptides, oligopeptides, homodimers, heterodimers, variants of polypeptides, modified polypeptides, derivatives, analogs, and fusion proteins, among others.

[0032] A “polynucleotide” is a sequence of nucleotide bases, and may be RNA, DNA or DNA-RNA hybrid sequences (including both naturally occurring and/or non-naturally occurring nucleotides). In embodiments, a polynucleotide is either a single or double stranded DNA sequence.

[0033] As used herein, by “isolate” or “purify” (or grammatical equivalents) a nucleic acid, it is meant that the nucleic acid is at least partially separated from at least some of the other components in a starting material comprising the nucleic acid (e.g., a cell lysate). In embodiments, an “isolated” or “purified” nucleic acid may be enriched by at least about 10-fold, about 100-fold, about 1000-fold, about 10,000-fold or more as compared with the starting material.

[0034] As used herein, the term “polypeptide with phase behavior” refers to any polypeptide that is capable of undergoing a phase transition. In embodiments, the polypeptide undergoes a phase transition due to the application of an environmental factor. Exemplary polypeptides with phase behavior include elastin-like polypeptides (ELPs) and resilin-like polypeptides (RLPs).

[0035] As used herein, the term “fusion protein” refers to a polypeptide produced when two heterologous nucleotide sequences or fragments thereof coding for two (or more) different polypeptides not found fused together in nature are fused together in the correct translational reading frame.

[0036] As used herein, the term “nucleic acid binding protein”, also known as an NBP, may refer to any amino acid sequence (protein, peptide, etc.) which binds to a target nucleic acid. In embodiments, the NBP may comprise a full-length, truncated, or modified version of a receptor for the target nucleic acid. In embodiments, the NBP may be an antigen-binding portion of a monoclonal antibody (e.g., a Fab), a single-chain variable fragment (scFv) derived from a monoclonal antibody; a natural ligand of the target nucleic acid; a peptide with sufficient affinity for the target nucleic acid; a single domain binder such as a camelid; an artificial binder such as a Darpin; or a single-chain derived from a T-cell receptor.

[0037] As used herein, the term “fragment” as it refers to a protein or polypeptide includes a truncated form of the protein or polypeptide. For example, a fragment of an NBP may include from about 50% to about 99.9% of the full length NBP. In embodiments, the fragment of the NBP comprises about 50%, about 55%, about 60%, about 65%, about 70%, about 75%, about 80%, about 85%, about 90%, about 95%, about 97%, or about 99% of the amino acids of the full length NBP.

[0038] As used herein, the term “capture efficiency” as it relates to a fusion protein described herein refers to the amount of nucleic acid captured by a fusion protein relative to the amount of nucleic acid present in the starting composition. The following equation is used to determine capture efficiency: 100×(amount of nucleic acid captured by the fusion protein/amount of nucleic acid in the composition before purification).

[0039] The term “percent identity” in the context of two or more nucleic acid or polypeptide sequences, refers to two or more sequences or subsequences that have a specified percentage of nucleotides or amino acid residues that are the same, when compared. Unless otherwise indicated, sequence identity is determined using the National Center for Biotechnology Information (NCBI)'s Basic Local Alignment Search Tool (BLAST®), available at blast.ncbi.nlm.nih.gov/Blast.cgi. In embodiments, the sequence identity is calculated over the entire length of the compared sequences. In embodiments, the sequence identity is calculated over a fragment of each compared sequence of about a 20-amino acid, 50-amino acid, 75-amino acid, 100-amino acid, 250-amino acid, 500-amino acid, 750-amino acid, or 1000-amino acids.

### Fusion Proteins

The disclosure provides fusion proteins and methods of using the fusion proteins to purify nucleic acids. In embodiments, the fusion protein comprises a NBP which binds to the target nucleic acid (i.e., a nucleic acid binding protein) and a polypeptide with phase behavior, wherein the NBP is coupled to the polypeptide with phase behavior.

### Nucleic Acid Binding Proteins

[0040] In embodiments, the fusion protein comprises a nucleic acid binding protein (NBP). In embodiments, the NBP binds to one or more nucleic acids. In embodiments, the NBP binds to a single stranded nucleic acid (e.g., single stranded DNA or RNA). In embodiments, the NBP binds to a double stranded nucleic acid (e.g., double stranded DNA or RNA). In embodiments, the NBP binds to DNA. In embodiments, the DNA is single stranded or double stranded. In embodiments, the NBP binds to RNA. In embodiments, the RNA is single stranded or double stranded. In embodiments, the NBP binds to both DNA and RNA, wherein the DNA and RNA are single stranded, double stranded, or a combination of both. In embodiments, the NBP binds to polyadenosine (polyA) DNA. In embodiments, the NBP binds to polyadenosine (polyA) RNA. In embodiments, the NBP binds to polythymidine (polyT) DNA. In embodiments, the NBP binds to polyuridine (PolyU) RNA. In embodiments, the NBP binds to polycytidine (polyC) RNA. In embodiments, the NBP binds to polyguanidine (polyG) RNA. In embodiments, the NBP binds to polycytidine (polyC) DNA. In embodiments, the NBP binds to polyguanidine (polyG) DNA.

[0041] In embodiments, the NBP binds to DNA, a microRNA, capped RNA, DNA, double stranded RNA, transfer RNA, ribosomal RNA, a small nuclear RNA, a regulatory RNA, a ribozyme, a transfer RNA, or a messenger RNA.

[0042] In embodiments, the NBP binds to an AU-rich RNA element (ARE). An ARE refers to an adenylate-uridylate-rich element in the 5′ or 3′ untranslated region of a mRNA. AREs contain the core sequence AUUUA. AREs are a determinant of RNA stability, and often occur in mRNAs of proto-oncogenes, nuclear transcription factors, and cytokines. Proteins that bind to ARE are referred to as ARE-binding proteins (ARE-BP). In embodiments, ARE-BP stabilize mRNA. Non-limiting examples of ARE-BP include human antigen R (huR, also called “ELAV”), tristetrapolin (TTP), AU-rich element RNA-binding protein (AUF), and fragile X mental retardation syndrome-related protein 1 (FXR1). The following articles describe ARE-BP and are incorporated by reference herein in their entirety: Otsuka et al. Front. Genet., 2 May 2019; Brennan and Steitz. Cell Mol Life Sci. 2001 February; 58(2):266-77; Carballo et al. 1998. Science, 281, 1001-1005; Mazan-Mamczarz et al. Oncogene volume 27, pages 6151-6163 (2008); Vasudevan and Steitz. Cell. 2007 Mar. 23; 128(6):1105-18; Curr Cancer Drug Targets. 2019; 19(5):382-399; J Biol Chem. 2017 Apr. 28; 292(17):6869-6881. doi: 10.1074/jbc.M116.772947. Epub 2017 Mar. 16; Wiley Interdiscip Rev RNA. July-August 2014; 5(4):549-64. doi: 10.1002/wrna.1230; and Elife. 2017 Aug. 2; 6:e26129. doi: 10.7554/eLife.26129; Mazan-Mamczarz et al. 2008. Nucleic Acids Research, 37, 204-214. In embodiments, an NBP binds to an ARE. In embodiments, the NBP binding to an ARE incorporates a binding element of huR, TTP, AUF, or FXR1. AREs are disclosed in the reference incorporated in its entirety herewith: Barreau C, et al. AU-rich elements and associated factors: are there unifying principles? Nucleic Acids Res. 2006 Jan. 3; 33(22):7138-50. In embodiments, the NBP binds to Z-conformation DNA (Z-DNA).

[0043] In embodiments, the NBP binds to Z-conformation RNA (Z-RNA). In general, Z-DNA and R-DNA are left-handed structures of DNA and RNA, respectively as described in the reference incorporated in its entirety herein: Barreau C, et al. AU-rich elements and associated factors: are there unifying principles? Nucleic Acids Res. 2006 Jan. 3; 33(22):7138-50.

[0044] In embodiments, the NBP binds to microRNA.

[0045] In embodiments, the NBP binds to small nuclear RNA (snRNA). In embodiments, the NBP binds to small nucleolar RNA (snoRNA).

[0046] In embodiments, the NBP binds to regulatory RNA.

[0047] In embodiments, the NBP binds to a ribozyme.

[0048] In embodiments, the NBP binds to transfer RNA (tRNA). In embodiments, the NBP binds to long non-coding RNA (lncRNA).

[0049] In embodiments, the NBP binds to mRNA. In embodiments, the NBP binds to pre-mRNA. In embodiments, the NBP binds to a pre-mRNA intron. In embodiments, the NBP binds to a pre-mRNA exon. In embodiments, the NBP binds to the 3′ termini of mRNA. In embodiments, the NBP binds to 5′ termini of mRNA. In embodiments, the NBP binds to 5′ cap of mRNA. In embodiments, the NBP binds to a positively charged, intrinsically disorder region (IDR) or a nucleic acid. In embodiments, the NBP binds to a nucleic acid sequence. In embodiments, the NBP binds to a nucleic acid structure. In embodiments, the NBP binds to a nucleic acid secondary structure. In embodiments, the NBP binds to a nucleic acid tertiary structure. In embodiments, the NBP binds to a naturally occurring nucleic acid. In embodiments, the NBP binds to a synthetically made nucleic acid. In embodiments, the nucleic acid is naturally occurring but has been modified by synthetic means.

[0050] In embodiments, the NBP binds to a nucleic acid sequence, wherein the nucleic acid sequence is about 30 nucleotides to about 10,000 nucleotides in length. In embodiments, the nucleic acid is at least about 30 nucleotides in length. In embodiments, the nucleic acid is at least about 35 nucleotides in length, such as at least about 35, 40, 45, 50, 55, 60, 70, 80, 90, 100, 120, 140, 160, 180, 200, 250, 300, 350, 400, 450, 500, 600, 700, 800, 900, 1,000, 1,100, 1,200, 1,300, 1,400, 1,500, 1,600, 1,700, 1,800, 1,900, 2,000, 2,500, 3,000, 4,000, 5,000, 6,000, 7,000, 8,000, 9,000, or at least about 10,000 nucleotides in length. In embodiments, the nucleic acid is at least about 100 nucleotides in length. In embodiments, the nucleic acid is at least about 250 nucleotides in length. In embodiments, the nucleic acid is at least about 500 nucleotides in length. In embodiments, the nucleic acid is at least about 1,000 nucleotides in length. In embodiments, the nucleic acid is at least about 1,500 nucleotides in length. In embodiments, the nucleic acid is at least about 2,000 nucleotides in length. In embodiments, the nucleic acid is at least about 2,500 nucleotides in length. In embodiments, the nucleic acid is at least about 3,000 nucleotides in length. In embodiments, the nucleic acid is at least about 4,000 nucleotides in length. In embodiments, the nucleic acid is at least about 5,000 nucleotides in length. In embodiments, the nucleic acid is at least about 6,000 nucleotides in length. In embodiments, the nucleic acid is at least about 7,000 nucleotides in length. In embodiments, the nucleic acid is at least about 8,000 nucleotides in length. In embodiments, the nucleic acid is at least about 9,000 nucleotides in length. In embodiments, the nucleic acid is at least about 10,000 nucleotides in length.

[0051] In embodiments, the nucleic acid has a size from about 0.001 μm to about 500 μm in diameter or length. In embodiments, the nucleic acid has a diameter between 1 nm and 100 μm, inclusive of the endpoints. In embodiments, the nucleic acid has a diameter between 1 nm and 100 nm, inclusive of the endpoints. In embodiments, the nucleic acid has a diameter between 100 nm and 1 μm, inclusive of the endpoints. In embodiments, the nucleic acid has a diameter between 1 μm and 50 μm, inclusive of the endpoints. In embodiments, the nucleic acid has a diameter between 50 μm and 100 μm, inclusive of the endpoints.

[0052] In embodiments, the size (i.e., diameter or length) of the nucleic acid is about 0.001 μm, about 0.002 μm, about 0.003 μm, about 0.004 μm, about 0.005 μm, about 0.006 μm, about 0.007 μm, about 0.008 μm, about 0.009 μm, about 0.010 μm, about 0.020 μm, about 0.030 μm, about 0.040 μm, about 0.050 μm, about 0.060 μm, about 0.070 μm, about 0.080 μm, about 0.090 μm, about 0.1 μm, about 0.2 μm, about 0.3 μm, about 0.4 μm, about 0.5 μm, about 0.6 μm, about 0.7 μm, about 0.8 μm, about 0.9 μm, about 1 μm, about 2 μm, about 3 μm, about 4 μm, about 5 lam, about 6 lam, about 7 lam, about 8 lam, about 9 lam, about 10 lam, about 11 μm, about 12 lam, about 13 μm, about 14 μm, about 15 μm, about 16 μm, about 17 μm, about 18 μm, about 19 μm, about 20 lam, about 21 μm, about 22 lam, about 22 lam, about 23 lam, about 24 lam, about 25 lam, about 26 μm, about 27 μm, about 28 μm, about 29 μm, about 30 μm, about 31 μm, about 32 μm, about 33 μm, about 34 μm, about 35 μm, about 36 μm, about 37 μm, about 38 μm, about 39 μm, about 40 μm, about 41 μm, about 42 μm, about 43 μm, about 44 μm, about 45 μm, about 46 μm, about 47 μm, about 48 μm, about 49 μm, about 50 μm, about 55 μm, about 60 μm, about 65 μm, about 70 μm, about 75 μm, about 80 μm, about 85 μm, about 90 μm, about 95 μm, about 100 μm, about 150 μm, about 200 μm, about 250 μm, about 300 μm, about 350 μm, about 400 μm, about 450 μm, or about 500 μm, or greater, including all values and ranges in between. In embodiments, the nucleic acid has a size of greater than or equal to 10 μm. In embodiments, the nucleic acid has a size that is greater than or equal to 25 μm. In embodiments, the nucleic acid has a size that is greater than or equal to 50 μm. In embodiments, the nucleic acid has a size that is greater than or equal to 100 μm.

[0053] In some embodiments, the nucleic acid has a size (i.e., molar mass) from about 2 kDa to about 1000 MDa. In embodiments, the nucleic acid has a molar mass of about 2 kDa, about 5 kDa, about 15 kDa, about 20 kDa, about 20 kDa, about 25 kDa, about 30 kDa, about 35 kDa, about 40 kDa, about 45 kDa, about 50 kDa, about 55 kDa, about 60 kDa, about 65 kDa, about 70 kDa, about 75 kDa, about 80 kDa, about 85 kDa, about 90 kDa, about 95 kDa, about 100 kDa, about 150 kDa, about 200 kDa, about 250 kDa, about 300 kDa, about 350 kDa, about 400 kDa, about 450 kDa, about 500 kDa, about 550 kDa, about 600 kDa, about 650 kDa, about 700 kDa, about 750 kDa, about 800 kDa, about 850 kDa, about 900 kDa, about 950 kDa, about 1000 kDa, about 1 MDa, about 5 MDa, about 10 MDa, about 15 MDa, about 20 MDa, about 25 MDa, about 50 MDa, about 75 MDa, about 100 MDa, about 125 MDa, about 150 MDa, about 175 MDa, about 200 MDa, about 225 MDa, about 250 MDa, about 275 MDa, about 300 MDa, about 325 MDa, about 350 MDa, about 400 MDa, about 425 MDa, about 450 MDa, about 500 MDa, about 550 MDa, about 600 MDa, about 650 MDa, about 700 MDa, about 750 MDa, about 800 MDa, about 850 MDa, about 900 MDa, about 950 MDa, or about 1000 MDa, including all values and ranges therebetween.

[0054] In some embodiments, the fusion protein comprises from 1 to about 100 NBPs, from 1 to about 75 NBPs, from 1 to about 50 NBPs, from 1 to about 40 NBPs, from 1 to about 30 NBPs, from 1 to about 20 NBPs, from 1 to about 15 NBPs, from 1 to about 10 NBPs, or from 1 to about 5 NBPs. In embodiments, the fusion protein comprises about 1, about 5, about 10, about 20, about 30, about 40, about 50, about 55, about 60, about 65, about 70, about 75, about 80, about 85, about 90, about 95, or about 100 NBPs. In embodiments, a single polypeptide with phase behavior may be coupled to multiple NBPs, such as about 1 to 100 NBP.

[0055] In embodiments, a fusion protein may have two or more NBPs that each bind to different nucleic acids or that bind to the same nucleic acid.

[0056] In embodiments, the affinity of a NBP for a nucleic acid is modulated to facilitate separation of the nucleic acid from the fusion protein.

[0057] In embodiments, the NBP is selected from any one of RNA-specific adenosine deaminase 1 (ADAR1), ADAR1 double stranded RNA-binding domain 3 (dsRBD3), Bacillus subtilis cold shock protein B (Bs-CspB), cold shock domain Y-box protein (CSD-Ybox), eukaryotic translation initiation factor 4E (eIF4e), Fox-1 protein (FOX1), heterogenous nuclear ribonucleoprotein Q1 (hnRNPQ1), Homo sapiens zinc finger CCCH-Type containing 14 (HsZC3H14), polyA-binding protein (PABP), polyA-binding protein nuclear 1 (PABPN1), pentatricopeptide repeat protein A (PPRpA), Pumilio-Homology Domain (PUM-HD), Pumilio-like repeat protein A (PUFpA), Staufen, 12-O-tetradecanoylphorbol-13-acetate inducible sequence 11 D (TIS11D), Z-DNA/RNA binding protein 1 (ZBP1), and Zinc Finger Nuclease (ZNF). In embodiments, the NBP is ADAR1. In embodiments, the NBP is ADAR1 dsRBD3. In embodiments, the NBP is Bs-CspB. In embodiments, the NBP is CSD-Ybox. In embodiments, the NBP is eIF4e. In embodiments, the NBP is FOX1. In embodiments, the NBP is hnRNPQ1. In embodiments, the NBP is HsZC3H14. In embodiments, the NBP is PABP. In embodiments, the NBP is PABPN1. In embodiments, the NBP is PPRpA. In embodiments, the NBP is PUFpA. In embodiments, the NBP is PUM-HD. In embodiments, the NBP is Staufen. In embodiments, the NBP is TIS11D. In embodiments, the NBP is ZBP. In embodiments, the NBP is ZNF.

[0058] In embodiments, the NBP is RNA-specific adenosine deaminase 1 (ADAR1) or a fragment, subunit, or domain thereof. ADAR1 is a polypeptide that catalyzes the post-transcriptional deamination of adenosines, thereby converting them to inosines. ADAR1 binds to and catalyzes double stranded RNA. ADAR1 is described in the following reference, which is incorporated by reference herein in its entirety: Song B, et al. The role of RNA editing enzyme ADAR1 in human disease. Wiley Interdiscip Rev RNA. 2022 January; 13(1):e1665. ADAR1 comprises one or more Z-DNA binding domains, one or more dsRNA binding domains, and a deaminase domain. In embodiments, the NBP is ADAR1 double stranded RNA-binding domain 3 (dsRBD3).

[0059] In embodiments, the ADAR1 dsRBD3 has an amino acid sequence that is at least 80%, at least 81%, at least 82%, at least 83%, at least 84%, at least 85%, at least 86%, at least 87%, at least 88%, at least 89%, at least 90%, at least 91%, at least 92%, at least 93%, at least 94%, at least 95%, at least 96%, at least 97%, at least 98%, at least 99%, or 100% identical to the polypeptide of SEQ ID NO: 89.

[0060] In embodiments, an NBP comprises a cold shock domain (CSD). CSD contain five antiparallel β-strands that form a β-barrel structure known as an oligosaccharide-/oligonucleotide binding fold. CSD bind to single stranded RNA and single stranded DNA. In embodiments, CSD are comprised of from 60 to 80 amino acids, for example, about 60, about 61, about 62, about 63, about 64, about 65, about 66, about 67, about 68, about 69, about 70, about 71, about 72, about 73, about 74, about 75, about 76, about 77, about 78, about 79, or about 80 amino acids. In embodiments, CSD contain about 70 amino acids. In embodiments, the CSD is a bacterial CSD. In embodiments, bacterial CSD prefer ssDNA to ssRNA by up to ten-fold.

[0061] In embodiments, the NBP is Bacillus subtilis cold shock protein B (Bs-CspB) or a fragment, subunit, or domain thereof. Bs-CspB is also known as CspB from Bacillus subtilis (Bscscp). Bs-CspB binds to single stranded DNA (ssDNA) and single stranded RNA (ssRNA). Bs-CspB is a polypeptide that functions as an RNA chaperone and transcriptional anti-terminator. Bs-CspB is described in the following reference, which is incorporated by reference in its entirety herein: Sachs R, et al. RNA single strands bind to a conserved surface of the major cold shock protein in crystals and solution. RNA. 2012 January; 18(1):65-76. Bs-CspB comprises one or more nucleic acid binding motifs.

[0062] In embodiments the fusion protein comprises Bs-CspB. In embodiments, Bs-CspB binds to RNA, DNA, or both. In embodiments, Bs-CspB binds to RNA selected from any one of double stranded RNA (dsRNA), single stranded RNA (ssRNA), mRNA, pre-mRNA, polyadenosine (polyA) RNA, Z-confirmation RNA (Z-RNA), or a combination thereof. In embodiments Bs-CspB binds to ssRNA. In embodiments, Bs-CspB binds to the 3′-terminus of mRNA, the 3′-terminus of mRNA, a 3′ untranslated region (UTR) of mRNA, a polyA tail of mRNA, or an AU-rich element, or combination thereof, of mRNA. In embodiments, Bs-CspB binds to binds to an intron, exon, polyA tail, or combination thereof, of the pre-mRNA. In embodiments, Bs-CspB binds to DNA. In embodiments, Bs-CspB binds to single stranded DNA, double stranded DNA, polyadenosine (polyA) DNA, Z-conformation DNA (Z-DNA), or a combination thereof.

[0063] In embodiments, the Bs-CspB has an amino acid sequence that is at least 80%, at least 81%, at least 82%, at least 83%, at least 84%, at least 85%, at least 86%, at least 87%, at least 88%, at least 89%, at least 90%, at least 91%, at least 92%, at least 93%, at least 94%, at least 95%, at least 96%, at least 97%, at least 98%, at least 99%, or 100% identical to the polypeptide of SEQ ID NO: 90.

[0064] In embodiments, the NBP is cold shock domain Y-box protein (CSD-Ybox) or a fragment, subunit, or domain thereof. CSD-Ybox is also known as Y-box protein 1 (YB1) cold shock domain (CSD) (YB1-CSD). CSD-Ybox binds to single stranded DNA (ssDNA) and single stranded RNA (ssRNA). CSD-Ybox is a polypeptide that regulates nucleic acid metabolism, e.g., through DNA reparation, pre-mRNA transcription and splicing, mRNA packaging, and regulation of mRNA stability and translation. CSD-Ybox is described in the following reference, which is incorporated by reference in its entirety herein: Heinemann U. and Roske Y. Cold-Shock Domains-Abundance, Structure, Properties, and Nucleic-Acid Binding. Cancers (Basel) 2021 Jan. 7; 13(2):190. CSD-Ybox comprises one or more nucleic acid binding motifs.

[0065] In embodiments, the CSD-Ybox has an amino acid sequence that is at least 80%, at least 81%, at least 82%, at least 83%, at least 84%, at least 85%, at least 86%, at least 87%, at least 88%, at least 89%, at least 90%, at least 91%, at least 92%, at least 93%, at least 94%, at least 95%, at least 96%, at least 97%, at least 98%, at least 99%, or 100% identical to the polypeptide of SEQ ID NO: 91.

[0066] In embodiments, the NBP is eukaryotic translation initiation factor 4E (eIF4e) or a fragment, subunit, or domain thereof. eIF4e binds to the 5′-cap of mRNA. eIF4e is a polypeptide that, in synergy with other proteins, binds to mRNA and allows the recruitment of ribosomes for translation initiation. eIF4e is described in the following reference, which is incorporated by reference in its entirety herein: Davis, M. R., et al. Nuclear eIF4E Stimulates 3′-end Cleavage of Target RNAs. Cell Reports, 27, 1397-1408. eIF4e comprises a cap binding pocket.

[0067] In embodiments, the eIF4e has an amino acid sequence that is at least 80%, at least 81%, at least 82%, at least 83%, at least 84%, at least 85%, at least 86%, at least 87%, at least 88%, at least 89%, at least 90%, at least 91%, at least 92%, at least 93%, at least 94%, at least 95%, at least 96%, at least 97%, at least 98%, at least 99%, or 100% identical to the polypeptide of any one of SEQ ID NOS: 86, 87, 88, and 96.

[0068] In embodiments, the eIF4e has an amino acid sequence that is at least 80%, at least 81%, at least 82%, at least 83%, at least 84%, at least 85%, at least 86%, at least 87%, at least 88%, at least 89%, at least 90%, at least 91%, at least 92%, at least 93%, at least 94%, at least 95%, at least 96%, at least 97%, at least 98%, at least 99%, or 100% identical to the polypeptide of any one of SEQ ID NOS: 86 and 87.

[0069] In embodiments, the NBP is Fox-1 protein (FOX1) or a fragment, subunit, or domain thereof. FOX1 binds to pre-mRNA introns and exons. FOX1 is a polypeptide that promotes or represses exon expression by regulating alternative splicing. FOX1 is described in the following reference, which is incorporated by reference in its entirety herein: Kuroyanagi H. Fox-1 family of RNA-binding proteins. Cell Mol Life Sci. 2009 December; 66(24):3895-907. FOX1 comprises an RNA recognition motif (RRM).

[0070] In embodiments, the FOX1 has an amino acid sequence that is at least 80%, at least 81%, at least 82%, at least 83%, at least 84%, at least 85%, at least 86%, at least 87%, at least 88%, at least 89%, at least 90%, at least 91%, at least 92%, at least 93%, at least 94%, at least 95%, at least 96%, at least 97%, at least 98%, at least 99%, or 100% identical to the polypeptide of SEQ ID NO: 92.

[0071] In embodiments, the NBP is heterogenous nuclear ribonucleoprotein Q1 (hnRNPQ1) or a fragment, subunit, or domain thereof. hnRNPQ1 binds to mRNA. hnRNPQ1 is a polypeptide that regulates mRNA processing events, e.g., pre-mRNA splicing, mRNA transport, and translational regulation. hnRNPQ1 is described in the following reference, which is incorporated by reference in its entirety herein: Xing, L. et al. Negative regulation of RhoA translation and signaling by hnRNP-Q1 affects cellular morphogenesis. Molecular Biology of the Cell 2012 23:8, 1500-1509. hnRNPQ1 comprises one or more RNA recognition motifs (RRM), an acidic domain, and an Arg-Gly-Gly (RGG) box domain.

[0072] In embodiments, the hnRNPQ1 has an amino acid sequence that is at least 80%, at least 81%, at least 82%, at least 83%, at least 84%, at least 85%, at least 86%, at least 87%, at least 88%, at least 89%, at least 90%, at least 91%, at least 92%, at least 93%, at least 94%, at least 95%, at least 96%, at least 97%, at least 98%, at least 99%, or 100% identical to the polypeptide of SEQ ID NO: 93.

[0073] In embodiments, the NBP is Homo sapiens zinc finger CCCH-Type containing 14 (HsZC3H14) or a fragment, subunit, or domain thereof. HsZC3H14 binds to polyA RNA. HsZC3H14 is a polypeptide that regulates the length of 3′-polyadenosine (polyA) tails. HsZC3H14 is described in the following reference, which is incorporated by reference in its entirety herein: Rha J, et al. The RNA-binding protein, ZC3H14, is required for proper poly(A) tail length control, expression of synaptic proteins, and brain function in mice. Hum Mol Genet. 2017 Oct. 1; 26(19):3663-3681. HsZC3H14 comprises an N-terminal Proline-Tryptophan-Isoleucine (PWI)-like domain and a C-terminal tandem CysCysCysHis (CCCH) Zinc Finger (ZF) domain.

[0074] In embodiments, the HsZC3H14 has an amino acid sequence that is at least 80%, at least 81%, at least 82%, at least 83%, at least 84%, at least 85%, at least 86%, at least 87%, at least 88%, at least 89%, at least 90%, at least 91%, at least 92%, at least 93%, at least 94%, at least 95%, at least 96%, at least 97%, at least 98%, at least 99%, or 100% identical to the polypeptide of any one of SEQ ID NOS: 94 and 95.

[0075] In embodiments, the NBP is polyA-binding protein (PABP) or a fragment, subunit, or domain thereof. PABP binds to polyA RNA. PABP is a polypeptide that mediates mRNA circularization. PABP is described in the following reference, which is incorporated by reference in its entirety herein: Mangus D. A., et al. Poly(A)-binding proteins: multifunctional scaffolds for the post-transcriptional control of gene expression. Genome Biol 4, 223 (2003). PABP comprises one or more RNA recognition motifs (RRM).

[0076] In embodiments, the PABP has an amino acid sequence that is at least 80%, at least 81%, at least 82%, at least 83%, at least 84%, at least 85%, at least 86%, at least 87%, at least 88%, at least 89%, at least 90%, at least 91%, at least 92%, at least 93%, at least 94%, at least 95%, at least 96%, at least 97%, at least 98%, at least 99%, or 100% identical to the polypeptide of any one of SEQ ID NOS: 74-85.

[0077] In embodiments, the PABP has an amino acid sequence that is at least 80%, at least 81%, at least 82%, at least 83%, at least 84%, at least 85%, at least 86%, at least 87%, at least 88%, at least 89%, at least 90%, at least 91%, at least 92%, at least 93%, at least 94%, at least 95%, at least 96%, at least 97%, at least 98%, at least 99%, or 100% identical to the polypeptide of SEQ ID NO: 77.

[0078] In embodiments, the NBP is polyA-binding protein nuclear 1 (PABPN1) or a fragment, subunit, or domain thereof. PABPN1 binds to polyA RNA tails. PABPN1 is a polypeptide that regulates RNA processing, e.g., prevents the nuclear export of unspliced RNA and regulating the length of polyA tail length. PABPN1 is described in the following reference, which is incorporated by reference in its entirety herein: Mangus D. A., et al. Poly(A)-binding proteins: multifunctional scaffolds for the post-transcriptional control of gene expression. Genome Biol 4, 223 (2003). PABPN1 an RNA recognition motifs (RRM).

[0079] In embodiments, the PABPN1 has an amino acid sequence that is at least 80%, at least 81%, at least 82%, at least 83%, at least 84%, at least 85%, at least 86%, at least 87%, at least 88%, at least 89%, at least 90%, at least 91%, at least 92%, at least 93%, at least 94%, at least 95%, at least 96%, at least 97%, at least 98%, at least 99%, or 100% identical to the polypeptide of SEQ ID NO: 97.

[0080] In embodiments, the NBP is pentatricopeptide repeat (PPR) or a fragment, subunit, or domain thereof. PPR binds to the 3′ or 5′ termini of RNA transcripts. PPR is a polypeptide that regulates RNA stabilization and translation activation. In embodiments, the NBP is PPR protein a (PPRpA). PPR contain from 20-50 amino acids, for example, about 20, about 21, about 22, about 23, about 24, about 25, about 26, about 27, about 28, about 29, about 30, about 31, about 32, about 33, about 34, about 35, about 36, about 37, about 38, about 39, about 40, about 41, about 42, about 43, about 44, about 45, about 46, about 47, about 48, about 49, or about 50 amino acids. In embodiments, a PPR comprises about 35 amino acids. In embodiments, an NBP comprises a PPR that repeats from about 2-30 times within the NBP sequence. In embodiments, an NBP comprises a PPR that repeats from about 10-30 times within the NBP sequence. In embodiments, the PPR may repeat about 2, about 3, about 4, about 5, about 6, about 7, about 8, about 9, about 10, about 11, about 12, about 13, about 14, about 15, about 16, about 17, about 18, about 19, about 20, about 21, about 22, about 23, about 24, about 25, about 26, about 27, about 28, about 29, or about 30 times within the NBP. In embodiments, the PPR repeats at least 10 times. PPR repeats may be consecutive or separated by one or more amino acids. PPR repeats form two antiparallel α-helices. In embodiments, NBPs comprising a PPR form a solenoid structure. In embodiments, NBPs comprising a PPR bind to single stranded RNA, single stranded DNA., or mRNA. In embodiments, NBPs comprising a PPR bind to the 5′ cap of mRNA. In embodiments, NBPs comprising a PPR bind to the 3′ poly A tail of mRNA. PPR is described in the following reference, which is incorporated by reference in its entirety herein: Manna, S. An overview of pentatricopeptide repeat proteins and their applications, Biochimie, 113, 2015, 93-99. PPR comprises one or more PPR motifs, one or more helix-turn-helix motifs,

[0081] In embodiments, the PPRpA has an amino acid sequence that is at least 80%, at least 81%, at least 82%, at least 83%, at least 84%, at least 85%, at least 86%, at least 87%, at least 88%, at least 89%, at least 90%, at least 91%, at least 92%, at least 93%, at least 94%, at least 95%, at least 96%, at least 97%, at least 98%, at least 99%, or 100% identical to the polypeptide of SEQ ID NO: 98.

[0082] In embodiments, the NBP is Pumilio-like repeat (PUF) or a fragment, subunit, or domain thereof. PUF binds to the 3′-UTRs of mRNA in the cytosol and precursors of rRNA in the nucleolus. PUF is a polypeptide that functions as a post-transcriptional and translational regulator. In embodiments, the NBP is a PUF protein A (PUFpA). PUF domains contain eight α-helical repeats of a conserved 36 amino acid sequence that forms a concave RNA binding surface. In embodiments, an NBP comprises from 1-8 of the α-helical repeats of a PUF domain, for example, 1, 2, 3, 4, 5, 6, 7, or 8 α-helical repeats. In embodiments, an NBP comprising a PUF binds to a poly A tail. In embodiments, an NBP comprising a PUF binds to mRNA. PUF is described in the following reference, which is incorporated by reference in its entirety herein: Wang M, et al. The PUF Protein Family: Overview on PUF RNA Targets, Biological Functions, and Post Transcriptional Regulation. Int J Mol Sci. 2018 Jan. 30; 19(2):410. PUF comprises one or more Pumilio-Homology Domain (PUM-HD).

[0083] In embodiments, the PUFpA has an amino acid sequence that is at least 80%, at least 81%, at least 82%, at least 83%, at least 84%, at least 85%, at least 86%, at least 87%, at least 88%, at least 89%, at least 90%, at least 91%, at least 92%, at least 93%, at least 94%, at least 95%, at least 96%, at least 97%, at least 98%, at least 99%, or 100% identical to the polypeptide of SEQ ID NO: 99.

[0084] In embodiments, the NBP is Pumilio-Homology Domain (PUM-HD) or a fragment, subunit, or domain thereof. PUM-HD binds to the 3′-UTRs of mRNA and represses their translation. PUM-HD is a polypeptide that functions as a post-transcriptional and translational regulator. PUF is described in the following reference, which is incorporated by reference in its entirety herein: Wang M, et al. The PUF Protein Family: Overview on PUF RNA Targets, Biological Functions, and Post Transcriptional Regulation. Int J Mol Sci. 2018 Jan. 30; 19(2):410. PUM-HD comprises a RNA recognition motif.

[0085] In embodiments, the PUM-HD has an amino acid sequence that is at least 80%, at least 81%, at least 82%, at least 83%, at least 84%, at least 85%, at least 86%, at least 87%, at least 88%, at least 89%, at least 90%, at least 91%, at least 92%, at least 93%, at least 94%, at least 95%, at least 96%, at least 97%, at least 98%, at least 99%, or 100% identical to the polypeptide of any one of SEQ ID NOS: 102 and 103.

[0086] In embodiments, the NBP is Staufen protein or a fragment, subunit, or domain thereof. Staufen binds to double stranded RNA (dsRNA). Staufen is a polypeptide that functions in RNA trafficking, decay, and translation repression. Staufen is described in the following reference, which is incorporated by reference in its entirety herein: Visentin S, et al. A multipronged approach to understanding the form and function of hStaufen protein. RNA. 2020 March; 26(3):265-277. Staufen comprises one or more dsRNA binding domains (RBDs) and one or more tubulin-binding domains (TBDs).

[0087] In embodiments, the Staufen has an amino acid sequence that is at least 80%, at least 81%, at least 82%, at least 83%, at least 84%, at least 85%, at least 86%, at least 87%, at least 88%, at least 89%, at least 90%, at least 91%, at least 92%, at least 93%, at least 94%, at least 95%, at least 96%, at least 97%, at least 98%, at least 99%, or 100% identical to the polypeptide of SEQ ID NO: 100.

[0088] In embodiments, the NBP is 12-O-tetradecanoylphorbol-13-acetate (TPA) inducible sequence 11 D (TIS11D) or a fragment, subunit, or domain thereof. TIS11D binds to AU-rich elements in mRNA. TIS11D is a polypeptide that functions in RNA metabolism and definitive hematopoiesis. TIS11D is described in the following reference, which is incorporated by reference in its entirety herein: Morgan, B. R. et al. Probing the Structural and Dynamical Effects of the Charged Residues of the TZF Domain of TIS11d, 2015 Biophysical Journal, 108:6, 1503-1515. TIS11D comprises one or more CCCH-type tandem zinc finger domains and one or more (R/K)YKTEL motifs.

[0089] In embodiments, the TIS11D has an amino acid sequence that is at least 80%, at least 81%, at least 82%, at least 83%, at least 84%, at least 85%, at least 86%, at least 87%, at least 88%, at least 89%, at least 90%, at least 91%, at least 92%, at least 93%, at least 94%, at least 95%, at least 96%, at least 97%, at least 98%, at least 99%, or 100% identical to the polypeptide of any one of SEQ ID NOS: 61-66.

[0090] In embodiments, the TIS11D has an amino acid sequence that is at least 80%, at least 81%, at least 82%, at least 83%, at least 84%, at least 85%, at least 86%, at least 87%, at least 88%, at least 89%, at least 90%, at least 91%, at least 92%, at least 93%, at least 94%, at least 95%, at least 96%, at least 97%, at least 98%, at least 99%, or 100% identical to the polypeptide of SEQ ID NO: 65.

[0091] In embodiments, the NBP is Z-DNA/RNA binding protein 1 (ZBP1) or a fragment, subunit, or domain thereof. ZBP1 binds to Z-conformation DNA and RNA. ZBP1 is a polypeptide that functions in the innate immune response by binding to foreign nucleic acids and inducing type-I interferon production. ZBP1 is described in the following reference, which is incorporated by reference in its entirety herein: Maelfait J, et al. Sensing of viral and endogenous RNA by ZBP1/DAI induces necroptosis. EMBO J. 2017 Sep. 1; 36(17):2529-2543. ZBP1 comprises one or more Z-binding domains (ZBDs).

[0092] In embodiments, the ZBP1 has an amino acid sequence that is at least 80%, at least 81%, at least 82%, at least 83%, at least 84%, at least 85%, at least 86%, at least 87%, at least 88%, at least 89%, at least 90%, at least 91%, at least 92%, at least 93%, at least 94%, at least 95%, at least 96%, at least 97%, at least 98%, at least 99%, or 100% identical to the polypeptide of any one of SEQ ID NOS: 67-73.

[0093] In embodiments, the ZBP1 has an amino acid sequence that is at least 80%, at least 81%, at least 82%, at least 83%, at least 84%, at least 85%, at least 86%, at least 87%, at least 88%, at least 89%, at least 90%, at least 91%, at least 92%, at least 93%, at least 94%, at least 95%, at least 96%, at least 97%, at least 98%, at least 99%, or 100% identical to the polypeptide of any one of SEQ ID NO: 65.

[0094] In embodiments, the NBP is Zinc Finger Nuclease (ZNF) or a fragment, subunit, or domain thereof. ZNF binds to double-stranded DNA and RNA. ZNF is a polypeptide that regulates gene expression at the transcriptional and translational level. ZNF is described in the following reference, which is incorporated by reference in its entirety herein: Chaves-Arquero B, et al. The distinct RNA-interaction modes of a small ZnF domain underlay TUT4(7) diverse action in miRNA regulation. RNA Biol. 2021 Nov. 12; 18(sup2):770-781. ZNF comprises one or more C2H2 domains, one or more CCHC domains, and a catalytic domain.

[0095] In embodiments, the ZNF has an amino acid sequence that is at least 80%, at least 81%, at least 82%, at least 83%, at least 84%, at least 85%, at least 86%, at least 87%, at least 88%, at least 89%, at least 90%, at least 91%, at least 92%, at least 93%, at least 94%, at least 95%, at least 96%, at least 97%, at least 98%, at least 99%, or 100% identical to the polypeptide of any one of SEQ ID NO: 101.

[0096] Described herein is a NBP comprising Bs-CspB. In embodiments, an NBP binds to double stranded RNA. In embodiments, the NBP comprises a dsRNA binding protein (dsRBD) or a fragment thereof. dsRBDs are described in the following reference which is incorporated by reference herein in its entirety: Banerjee et al. RNA Biol. 2014 October; 11(10): 1226-1232.

[0097] In embodiments, an NBP binds to capped mRNA. In embodiments, the NBP binding to capped mRNA comprises eukaryotic translation initiation factor 4E (eIF4E), eukaryotic translation initiation factor3 Subunit D (eIF3D), or a combination thereof.

[0098] In embodiments, the NBP binds to a groove of DNA or RNA. Non-limiting examples of nucleic acid binding proteins that bind to the groove of DNA or RNA include the trans-activator of transcription (Tat) protein of human immunodeficiency virus-1 (HIV-1), the REV protein of HIV-1, and the RSG-1.2 peptide. RSG-1.2 peptide is a synthetic peptide which binds to the Rev responsive element present within the env gene of the HIV-1 genome. The RSG-1.2 peptide is described in the following article, which is incorporated by reference herein in its entirety: Kumar et al. PLoS One. 2011; 6(8):e23300.

[0099] In embodiments, the NBP binds to mRNA. In embodiments, the NBP that binds to mRNA is a ribosomal protein. In embodiments, the ribosomal protein is a 70S ribosome or a 80S ribosome. In embodiments, the ribosomal protein is from the 40S or 60S subunit of the 80S ribosome. In embodiments, the ribosomal protein is from the 30S or 50S subunit of the 70S ribosome. In embodiments, the ribosomal protein is selected from the group consisting of the L3 ribosomal protein, the L4 ribosomal protein, the L13 ribosomal protein, the L20 ribosomal protein, the L22 ribosomal protein, the L24 ribosomal protein, the L24e ribosomal protein, the S12 ribosomal protein, the S14 ribosomal protein, and the eukaryotic initiation factor 4E-binding protein 1 (4EBP1).

[0100] In embodiments, the NBP that binds to mRNA is part of the spliceosome. In embodiments, the NBP that is part of the spliceosome is a splicing factor. In embodiments, the splicing factor is selected from the ASF/SF2 splicing factor, serine/arginine rich splicing factor 4 (SRp75), and the serine and arginine rich splicing factor 1 (SRSF1).

[0101] In embodiments, the NBP that binds to mRNA is a protein that localizes to p-granules. In embodiments, the protein that localizes to a p-granule is selected from the group consisting of LAF-1, MEG-1, and MEG-3. LAF-1, MEG-1, and MEG-3 are described in the following references, which are incorporated by reference herein in their entirety: Leacock et al. Genetics, Volume 178, Issue 1, 1 Jan. 2008, Pages 295-306; Wu et al. Mol Biol Cell. 2019 Feb. 1; 30(3): 333-345; Elbaum-Garfinkle et al. Proc Natl Acad Sci USA. 2015 Jun. 9; 112(23):7189-94.

[0102] In embodiments, the NBP that binds to mRNA is a protein that removes or facilitates removal of the 5′ cap of mRNA, referred to herein as a “decapping protein.” In embodiments, the protein that removes or facilitates removal of the 5′ cap of mRNA is Dcp1, Dcp2, or a combination thereof. Dcp1 and Dcp2 are described in the following reference which is incorporated by reference herein in its entirety: Valkov et al. Nature Structural & Molecular Biology volume 23, pages 574-579 (2016).

[0103] In embodiments, the NBP that binds to mRNA is a component of a processing body (p-body). In embodiments, the component of a p-body is Edc3, DHX9, or Xrn1. Components of p-bodies are described in the following reference which is incorporated by reference herein in its entirety: Luo et al. Biochemistry 2018, 57, 17, 2424-2431.

[0104] In embodiments, the NBP that binds to mRNA is stem-loop binding protein (SLBP). SLBP binds to the histone 3′ untranslated region (UTR) stem loop structure in replication-dependent histone mRNAs. In embodiments, the NBP that binds to mRNA is a heterogenous nuclear ribonucleoprotein (hnRNP). hnRNPs are described in the following reference which is incorporated by reference herein in its entirety: Geuens et al. Hum Genet. 2016; 135: 851-867.

[0105] In embodiments, the NBP that binds to mRNA is GroEL.

[0106] In embodiments, the NBP is a protein involved in in vitro transcription. Non-limiting examples of NBPs involved in in vitro transcription include T7 RNA polymerase, Rnase inhibitor, 2′-O-Methyltransferase, Inorganic Pyrophosphatase, Poly(A) Polymerase, DNase I, Calf intestinal phosphatase, Antarctic phosphatase, D1 subunit of the Vaccinia virus mRNA capping enzyme, Guanine-7-methyltransferase (found in D1 subunit of the Vaccinia virus mRNA capping enzyme), Guanylyltransferase (found in D1 subunit of the Vaccinia virus mRNA capping enzyme), RNA triphosphatase (found in D1 subunit of the Vaccinia virus mRNA capping enzyme), and D12 subunit of vaccinia virus mRNA capping enzyme. The following references describe the aforementioned proteins and are incorporated by reference herein in their entirety: Dickson et al. Prog Nucleic Acid Res Mol Biol. 2005; 80: 349-374; Shuman et al. J Biol Chem. 1980 Dec. 10; 255 (23):11588-11598; Luo et al. J Virol. 1995 June; 69(6): 3852-3856; Kobori et al. PNAS Nov. 1, 1984 81 (21) 6691-6695.

[0107] In embodiments, the NBP is selected from the group consisting of poly(A)-binding protein (PABP), eukaryotic translation initiation factor 4E (eIF4E), eukaryotic translation initiation factor3 Subunit D (eIF3D), heterogenous nuclear ribonucleoproteins (hnRNPs), RNA-specific adenosine deaminase 1 (ADAR1), RNA-specific adenosine deaminase 2 (ADAR2), CspB from Bacillus subtilis (Bscscp), Y-box protein 1 cold shock domain (YB1-CSD), a Fox-1 protein (FOX1), poly(A)-binding protein (PABP), Staufen protein, TIS11d, zinc finger protein (ZNF), Z-DNA binding protein 1 (ZBP1), retinoic acid-inducible gene-I (RIG-I) like protein, toll like receptor 7 (TLR7), toll like receptor 8 (TLR3), toll like receptor 8 (TLR8), retinoic acid-inducible gene I (RIG-I), melanoma differentiation-associated protein 5 (MDA5), interferon induced protein with tetratricopeptide repeats 1 (IFITI), protein kinase R (PKR), 2′-5′-oligoadenylate synthetase, an oligoadenylate synthase-like (OASL) protein (e.g., OAS1, OAS2, OAS3, or OASL), ribonuclease E (RNASE E), gamma-interferon-inducible protein Ifi-16 (IF116), and cyclic GMP-AMP synthase (cGAS). The following references describe select aforementioned proteins and are incorporated by reference herein in their entirety: Kuroyanagi. Cell Mol Life Sci. 2009; 66(24): 3895-3907; Baou et al. J Biomed Biotechnol. 2009; 2009: 634520; and Brisse and Ly. Front. Immunol., 17 Jul. 2019; 10: 1586; Rehwinkel et al. Nature Reviews Immunology volume 20, pages537-551 (2020); and Brisse et al. Front Immunol. 2019; 10: 1586; Luo et al. Cell. 2011 Oct. 14; 147(2): 409-422.

[0108] In embodiments, the NBP comprises one or more RNA binding domains (RBDs) and one or more intrinsically disordered regions (IDRs). In embodiments, the IDR comprises an RG[G] repeat, an RS/RG rich domain, a K/R patch, molecular recognition features, a low complexity sequence, a pentatricopeptide domain, or a combination thereof.

[0109] In embodiments, the NBP comprises one or more of the following domains: a short linear motif (SLiM), an RG repeat, an RGG repeat, a RS/RG rich domain, a K/R basic patch, a molecular recognition feature, a low complexity sequence, an RNA recognition motif, a double-stranded RNA binding domain, a K homology domain, a zinc finger domain (e.g., CCHH ZF domain, a CCCC (Ran-BP2) domain, a CCCH ZF domain), an RGG domain, a Pumillo family domain, a pentatricopeptide domain, a cold shock domain, a helicase domain, a La motif, a Piwi-Argonaute-Zwille (PAZ) domain, a P-element induced wimpy testis, a pseudouridine synthase and archaeosine transglycosylate (PUA), a Pumillo-like repeat (PUM), a ribosomal S1-like (S1), Sm and Like-Sm (Sm/Lsm) repeat, thiouridine synthases and RNA methylases and pseudouridine synthases (THUMP), and a domain with YT521-B homology. The following references describe many of these domains and are incorporated by reference herein in their entireties: Balcerak et al. Open Biol. 2019 June; 9(6) 190096; Jarvelin et al. Cell Commun Signal, 2016: 14, 9; Corley et al. Mol. Cell. 2020 Apr. 2; 78(1): 9-29; De Franco et al. Sci Rep: 2019: 9, 2484; Shotwell et al. 2020. Wiley Interdiscip Rev RNA, 11, e1573; Simon et al. 2019. Molecular Cell, 75, 66-75.e5; Varadi et al, 2015, PLoS One, 10, e0139731; Zeke et al, 2020, WIREs RNA, n/a, e1714.

[0110] In embodiments, the NBP comprises a short linear motif (SLiM). A SLiM is composed of up to ten amino acid residue motifs located predominantly outside protein domains. SLiMs bind to RNA with low affinity in a non-specific manner. SLiMs are often repeated multiple times throughout a protein.

[0111] In embodiments, a NBP comprises a pseudouridine synthase and archaeosine transglycosylase (PUA) domain. PUA domains range from 67-94 amino acids in length, with a β₁α₁β₂β₃β₄β₃α₂β₆ architecture that forms a pseudobarrel encased by two α-helices. In embodiments, an NBP comprising a PUA binds to double stranded RNA.

[0112] In embodiments, a NBP comprises a S1 RNA binding domain. In embodiments, an NBP comprising a S1 RNA binding domain interacts with single stranded RNA, double stranded RNA, or mRNA. In embodiments, the S1 RNA binding domain comprises from about 60 to about 80 amino acids, for example, about 60, about 61, about 62, about 63, about 64, about 65, about 66, about 67, about 68, about 69, about 70, about 71, about 72, about 73, about 74, about 75, about 76, about 77, about 78, about 79, or about 80 amino acids. In embodiments, the S1 RNA binding domain comprises about 70 amino acids.

[0113] In embodiments, a NBP comprises an Sm RNA binding motif. Sm RNA binding motifs are found in Sm and Like-sm (Lsm) proteins in eukaryotes and archaea and in Hfq proteins in prokaryotes. The Sm motif consists of ˜70 residues with an α₁β₁β₂β₃β₄β₅ topology that forms a curved antiparallel β-sheet. Sm-containing proteins readily multimerize through interactions between strands 04 and 05 in two Sm motifs. In embodiments, a NBP comprises 1, 2, 3, 4, 5, 6, 7, 8, 9, or 10 Sm motifs. In embodiments, an NBP comprises two Sm motifs. In embodiments, an Sm binding motif binds to RNA through hydrogen bonding and base stacking interactions.

[0114] In embodiments, a NBP comprises a thiouridine synthase and RNA methylase and pseudouridine synthase (THUMP) domain. The THUMP domain is found in many tRNA-modifying enzymes. THUMP domains are found in proximity to RNA-modifying domains and sometimes in proximity to an N-terminal ferredoxin-like domain. THUMP domains display a α₁α₂β₁α₃β₂β₂ topology that forms parallel α-helices flanking a β-sheet. In embodiments, an NBP comprising a THUMP domain binds to tRNA.

[0115] In embodiments, a NBP comprises YT521-B homology domain. In embodiments, a YT521-B homology domains comprises from 100-150 amino acids, for example, about 100, about 101, about 102, about 103, about 104, about 105, about 106, about 107, about 108, about 109, about 110, about 111, about 112, about 113, about 114, about 115, about 116, about 117, about 118, about 119, about 120, about 121, about 122, about 123, about 124, about 125, about 126, about 127, about 128, about 129, about 130, about 131, about 132, about 133, about 134, about 135, about 136, about 137, about 138, about 139, about 140, about 141, about 142, about 143, about 144, about 145, about 146, about 147, about 148, about 149, or about 150 amino acids. In embodiments, a NBP comprising a YT521-B homology domain binds to a methylated adenosine.

[0116] In embodiments, a NBP comprises a Piwi-Argonautre-Zwille (PAZ) domain. In embodiments, a PAZ domain facilitates binding of small interfering mRNA and/or microRNA guides to mRNA targets. In embodiments, the PAZ domain is from a Dicer protein or an Argonaute protein. PAZ domains display a six-stranded β-barrel topped with two α-helices and flanked on the opposite side by a special appendage containing a β-hairpin and short α-helix.

[0117] In embodiments, a NBP comprises a P-element induced Wimpy Testis (PIWI) domain. In embodiments, a PIWI domain facilitates binding of small interfering mRNA and/or microRNA guides to mRNA targets. In embodiments, a PIWI domain is found on an Argonaute protein. The PIWI domain tertiary structure forms an RNase H-like fold consisting of a five-stranded β-sheet flanked by α-helices on both faces.

[0118] In embodiments, a NBP comprises a PAZ domain and a PIWI domain.

[0119] In embodiments, the NBP comprises an RS/RG rich domain. RS/RG rich domains contain repeats of arginine-serine (RS), arginine-glycine (RG), or a combination thereof. RS/RG rich domains mediate specific or non-specific interactions with RNA. Examples of proteins containing RS/RG rich domains include the SR proteins and SR-like proteins like serine/arginine-rich splicing factor 1 (SRSF1) and RNA-helicase DDX23.

[0120] In embodiments, an NBP comprises a helicase domain. Helicases comprise six superfamilies (SFs), including SF1, SF2, SF3, SF4, SF5, and SF6. In embodiments, the helicase domain is a eukaryotic RNA and DNA helicase from the SF1 or SF2 superfamilies. Non-limiting examples of families within the SF1 and SF2 superfamilies include the Upf1-like family, the DEAD-box, DEAH, RIG-I-like, Ski2-like, and NS3 families. In embodiments, the helicase domain is a bacterial or viral helicase from the SF3, SF4, SF5, or SF6 superfamily. ATP binding to a helicase promotes higher affinity of a helicase domain to RNA. ATP hydrolysis promotes conformational changes that cause the helicase to unwind its substrate and/or translocate one nucleotide.

[0121] In embodiments, a NBP comprises a La motif. The La motif consists of five α-helices and three β-strands that form a small antiparallel β-sheet against a modified “winged-helix” fold. In embodiments, the La motif binds to 3′-terminal UUU-OH elements on polymerase III transcribed small RNAs. La motifs comprise between 80 and 100 amino acids, for example, about 80, about 81, about 82, about 83, about 84, about 85, about 86, about 87, about 88, about 89, about 90, about 91, about 92, about 93, about 94, about 95, about 96, about 97, about 98, about 99, or about 100 amino acids. In embodiments, a La motif comprises about 90 amino acids.

[0122] In embodiments, the NBP comprises a RG[G] repeat. RG[G] repeats are known to have broad, degenerate binding. RG[G] repeats are motifs rich in arginine and glycine consisting of at least three RG/RGG repeats (e.g., from 3-500), separated by 10 amino acid residues. RG/RGG motifs include RGG and/or RG repeats of varied lengths interspersed with spacers of different amino acids. In embodiments, an NBP comprises a di-RGG motif. Di-RGG motifs contain two repeated RGG sequences separated by 0-4 amino acids. In embodiments, an NBP comprises a di-RG motif. Di-RG motifs contain two repeated RG sequences separated by 0-4 amino acids. In embodiments, an NBP comprises a tri-RGG motif. Tri-RGG motifs contain three repeated RGG sequences separated by 0-4 amino acids. In embodiments, an NBP comprises a tri-RG motif. Tri-RG motifs contain three repeated RG sequences separated by 0-4 amino acids. These motifs are described in the following article which is incorporated by reference herein in its entirety: Thandapani et al. (2013). Molecular Cell, 50, 613-623.

[0123] In embodiments, the amino acid sequence of the NBP comprises one or more RG, RGG, RGGR, RGGGR, or a combination thereof. In embodiments, NBPs comprising RG, RGG, RGGR, or RGGGR or a combination thereof mediate hydrogen bonding and base stacking with DNA and RNA via the arginine moieties. In embodiments, NBPs comprising RG, RGG, RGGR, RGGGR or a combination thereof bind to DNA G-quadruplexes. An exemplary protein containing a repeat of RGG, RGGR, or RGGGR is the RNA binding protein FUS. In embodiments, the NBP comprises FUS. In embodiments, the NBP sequence contains consecutive repeats of RGG, RGGR, RGGGR, or combinations thereof. An exemplary NBP containing a combination of RGG, RGGR, or RGGGR repeats may comprise the sequence RGGRGGRGGRRGGRRGGRRGGGRRGG. In embodiments, an NBP may comprise one or more RGG, RGGR, or RGGGR interspersed throughout its sequence. In embodiments, an NBP contains from 1 to 100 RG, RGG, RGGR, or RGGGR sequences. The RGG, RGGR, and RGGGR may be interspersed throughout the sequence (separated by one or more amino acids) or consecutive. In embodiments, the NBP comprises about 1, about 2, about 3, about 4, about 5, about 6, about 7, about 8, about 9, about 10, about 11, about 12, about 13, about 14, about 15, about 16, about 17, about 18, about 19, about 20, about 21, about 22, about 23, about 24, about 25, about 26, about 27, about 28, about 29, about 30, about 31, about 32, about 33, about 34, about 35, about 36, about 37, about 38, about 39, about 40, about 41, about 42, about 43, about 44, about 45, about 46, about 47, about 48, about 49, about 50, about 51, about 52, about 53, about 54, about 55, about 56, about 57, about 58, about 59, about 60, about 61, about 62, about 63, about 64, about 65, about 66, about 67, about 68, about 69, about 70, about 71, about 72, about 73, about 74, about 75, about 76, about 77, about 78, about 79, about 80, about 81, about 82, about 83, about 84, about 85, about 86, about 87, about 88, about 89, about 90, about 91, about 92, about 93, about 94, about 95, about 96, about 97, about 98, about 99, or about 100 RG, RGG, RGGR, or RGGGR repeats. The RG, RGG, RGGR, and RGGGR repeats may be consecutive or interspersed throughout the sequence. The following article describes exemplary RGG sequences and is incorporated by reference herein in its entirety: Simon et al. Molecular Cell (2019), 75, 66-75.e5.

[0124] In embodiments, an NBP comprises an RG domain. An RG domain comprises from about 2 to about 500 repeats of RG (arginine-glycine). In embodiments, an NBP comprises an RGG domain. An RGG domain comprises from about 2 to about 500 repeats of RGG (arginine-glycine-glycine). In embodiments, an NBP comprises an RGGR domain. An RGGR domain comprises from about 2 to about 500 repeats of RGGR (arginine-glycine-glycine-arginine). In embodiments, an NBP comprises an RGGGR domain. An RGGGR domain comprises from about 2 to about 500 repeats of RGG (arginine-glycine-glycine-glycine-arginine). In embodiments, an NBP comprise an RG mix domain. An RG mix domain comprises 2-500 simultaneous repeats of RG, RGG, RGGR, and/or RGGGR. For example, the RG mix domain may comprise RGG, followed by RG, followed by RGGR, followed by RG, followed by RGGGR.

[0125] In embodiments, the NBP comprises a K/R basic patch. A K/R basic patch contains from 4-8 consecutive lysines, arginines, or a combination thereof. K/R basic patches form a highly positive and exposed interface which binds to RNA. K/R basic patches are frequently contained in multiple clusters on the same protein.

[0126] In embodiments, the NBP comprises a molecular recognition feature (MoRF). In embodiments, the MoRF is up to 25 amino acids long, 50 or more amino acids long, or from 25 to 50 amino acids in length. MoRFs undergo a dynamic disorder-to-order transition upon ligand binding.

[0127] In embodiments, the NBP comprises a low complexity (LC) sequence. In embodiments, LC sequences contain up to 100 amino acids and are composed of many repeats of the same amino acid or several amino acid. LC sequences can polymerize into amyloid-like fibers and undergo reversible phase transition to a hydrogel-like state. Examples of proteins containing LC sequences are FUS and hnRNPA2.

[0128] In embodiments, the NBP comprises a RNA recognition motif (RRM). RRMs bind to RNA. Typically, binding is sequence-specific. In embodiments, RRMs comprise from about 75 to about 125 amino acids, for example, about 75, about 80, about 85, about 90, about 95, about 100, about 105, about 110, about 115, about 120, or about 125 amino acids in length. In embodiments, an RRM comprises about 85 amino acids. RRMs typically adopt a β₁α₁β₂β₃α₂β₄ topology forming two alpha-helices against an antiparallel beta sheet, which houses the conserved RNA-binding RNP1 and RNP2 motifs in central β₁ and β₃ strands.

[0129] In embodiments, the NBP comprises a double stranded RNA-binding domain (dsRBD). In embodiments, a dsRBD comprises from about 55 to about 80 amino acids, or from about 65 to about 70 amino acids. In embodiments, a dsRBD comprises 68 amino acids. dsRBD typically adopt an αβββα conformation. In embodiments, a dsRBD occurs as a tandem repeats or in combination with other RNA binding domains. There are two subclasses of dsRBDs, type B and type A. Type A has better binding to dsRNA than type B. dsRBDs typically bind in a shape dependent fashion and not sequence specific. However, ADAR2 is a rare example of a dsRBD that exhibits sequence specific binding.

[0130] In embodiments, the NBP comprises a K homology domain. In embodiments, the K homology domain comprises from 60 to 80 amino acids. In embodiments, the K homology domain comprises 70 amino acids. There are two types of K homology domains: type I or reverse type II. The type I K homology domain adopts the β₁α₁α₂β₂β′α′ topology. The reverse type II K homology domain adopts the α′β′β₁α₁α₂β₂ topology. K homology domains do not use aromatic amino acids for binding and instead use hydrogen bonding. NBP containing K homology domain are difficult to design due to their stringent sequence specificity.

[0131] In embodiments, the NBP comprises one or more zinc finger (ZF) domains. In embodiments, the NBP comprises from 1-100 ZF domains, for example, about 1, about 2, about 3, about 4, about 5, about 6, about 7, about 8, about 9, about 10, about 11, about 12, about 13, about 14, about 15, about 16, about 17, about 18, about 19, about 20, about 21, about 22, about 23, about 24, about 25, about 26, about 27, about 28, about 29, about 30, about 31, about 32, about 33, about 34, about 35, about 36, about 37, about 38, about 39, about 40, about 41, about 42, about 43, about 44, about 45, about 46, about 47, about 48, about 49, about 50, about 51, about 52, about 53, about 54, about 55, about 56, about 57, about 58, about 59, about 60, about 61, about 62, about 63, about 64, about 65, about 66, about 67, about 68, about 69, about 70, about 71, about 72, about 73, about 74, about 75, about 76, about 77, about 78, about 79, about 80, about 81, about 82, about 83, about 84, about 85, about 86, about 87, about 88, about 89, about 90, about 91, about 92, about 93, about 94, about 95, about 96, about 97, about 98, about 99, or about 100 ZF domains. In embodiments, the zinc finger domain is selected from one of the following subtypes: CCHC (zinc knuckle), CCCH, CCCC (RanBP2), and CCHH. C and H refer to the interspersed cysteine and histidine residues that coordinate the zinc atom. In embodiments, a zinc finger domain comprises from about 20 to about 40 amino acids, for example, about 20, about 22, about 24, about 26, about 28, about 30, about 32, about 34, about 36, about 38, or about 40 amino acids. CCHH ZF domains contain two conserved cysteine and two conserved histidine residues. CCHH ZF domains recognize both structural and sequence specific elements. To this date, there are no engineered versions of CCHH ZF domains. CCHH ZF domains bind both single stranded and double stranded DNA and RNA. CCCC ZFs might not require a specific RNA conformation for binding. Typically, CCCC ZFs recognize short three nucleotide repeats. An engineered version of the CCCC ZF is described in the following reference which is incorporated by reference herein in its entirety: De Franco et al. Sci Rep: 2019: 9, 2484.

[0132] In embodiments, the nucleic acid binding protein (NBP) is a polypeptide from Table 1 or a polypeptide with at least 80%, at least 81%, at least 82%, at least 83%, at least 84%, at least 85%, at least 86%, at least 87%, at least 88%, at least 89%, at least 90%, at least 91%, at least 92%, at least 93%, at least 94%, at least 95%, at least 96%, at least 97%, at least 98%, at least 99%, or 100% identity to any one of the polypeptides of Table 1. In embodiments, the NBP has an amino acid sequence with at least 80%, at least 81%, at least 82%, at least 83%, at least 84%, at least 85%, at least 86%, at least 87%, at least 88%, at least 89%, at least 90%, at least 91%, at least 92%, at least 93%, at least 94%, at least 95%, at least 96%, at least 97%, at least 98%, at least 99%, or 100% identity to a polypeptide of SEQ ID NO: 90.

TABLE 1
Exemplary amino acid sequences of NBP.

| SEQ ID NO | SEQUENCE | IDENTITY |
|---|---|---|
| 61 | MSTTLLSAFYDVDFLCKTEKSLANLNLNNMLDKKAVGTPVAAAPSSGFAPG | TIS11D |
| | FLRRHSASNLHALAHPAPSPGSCSPKFPGAANGSSCGSAAAGGPTSYGTLKE | |
| | PSGGGGTALLNKENKFRDRSFSENGDRSQHLLHLQQQQKGGGGSQINSTRY | |
| | KTELCRPFEESGTCKYGEKCQFAHGFHELRSLTRHPKYKTELCRTFHTIGFCP | |
| | YGPRCHFIHNADERRPAPSGGASGDLRAFGTRDALHLGFPREPRPKLHHSLS | |
| | FSGFPSGHHQPPGGLESPLLLDSPTSRTPPPPSCSSASSCSSSASSCSSASAAST | |
| | PSGAPTCCASAAAAAAAALLYGTGGAEDLLAPGAPCAACSSASCANNAFAF | |
| | GPELSSLITPLAIQTHNFAAVAAAAYYRSQQQQQQQGLAPPAQPPAPPSATL | |
| | PAGAAAPPSPPFSFQLPRRLSDSPVFDAPPSPPDSLSDRDSYLSGSLSSGSLSG | |
| | SESPSLDPGRRLPIFSRLSISDD | |
| 62 | STTLLSAFYDVDFLCKTEKSLANLNLNNMLDKKAVGTPVAAAPSSGFAPGF | TIS11D |
| | LRRHSASNLHALAHPAPSPGSCSPKFPGAANGSSCGSAAAGGPTSYGTLKEP | |
| | SGGGGTALLNKENKFRDRSFSENGDRSQHLLHLQQQQKGGGGSQINSTRYK | |
| | TELCRPFEESGTCKYGEKCQFAHGFHELRSLTRHPKYKTELCRTFHTIGFCPY | |
| | GPRCHFIHNADERRPAPSGGASGDLRAFGTRDALHLGFPREPRPKLHHSLSF | |
| | SGFPSGHHQPPGGLESPLLLDSPTSRTPPPPSCSSASSCSSSASSCSSASAASTP | |
| | SGAPTCCASAAAAAAAALLYGTGGAEDLLAPGAPCAACSSASCANNAFAF | |
| | GPELSSLITPLAIQTHNFAAVAAAAYYRSQQQQQQQGLAPPAQPPAPPSATL | |
| | PAGAAAPPSPPFSFQLPRRLSDSPVFDAPPSPPDSLSDRDSYLSGSLSSGSLSG | |
| | SESPSLDPGRRLPIFSRLSISDD | |
| 63 | MSTRYKTELCRPFEESGTCKYGEKCQFAHGFHELRSLTRHPKYKTELCRTFH | TIS11D |
| | TIGFCPYGPRCHFIHNADE | |
| 64 | MYGEKCQFAHGFHELRSLTRHPKYKTELCRTFHTIGFCPYGPR | TIS11D |
| 65 | STRYKTELCRPFEESGTCKYGEKCQFAHGFHELRSLTRHPKYKTELCRTFHTI | TIS11D |
| | GFCPYGPRCHFIHNADE | |
| 66 | YGEKCQFAHGFHELRSLTRHPKYKTELCRTFHTIGFCPYGPR | TIS11D |
| 67 | MAQAPADPGREGHLEQRILQVLTEAGSPVKLAQLVKECQAPKRELNQVLY | ZBP |
| | RMKKELKVSLTSPATWCLGGTDPEGEGPAELALSSPAERPQQHAATIPETPG | |
| | PQFSQQREEDIYRFLKDNGPQRALVIAQALGMRTAKDVNRDLYRMKSRHLL | |
| | DMDEQSKAWTIYRPEDSGRRAKSASIIYQHNPINMICQNGPNSWISIANSEAI | |
| | QIGHGNIITRQTVSREDGSAGPRHLPSMAPGDSSTWGTLVDPWGPQDIHME | |
| | QSILRRVQLGHSNEMRLHGVPSEGPAHIPPGSPPVSATAAGPEASFEARIPSP | |
| | GTHPEGEAAQRIHMKSCFLEDATIGNSNKMSISPGVAGPGGVAGSGEGEPGE | |
| | DAGRRPADTQSRSHFPRDIGQPITPSHSKLTPKLETMTLGNRSHKAAEGSHY | |
| | VDEASHEGSWWGGGI | |
| 68 | AQAPADPGREGHLEQRILQVLTEAGSPVKLAQLVKECQAPKRELNQVLYR | ZBP1 |
| | MKKELKVSLTSPATWCLGGTDPEGEGPAELALSSPAERPQQHAATIPETPGP | |
| | QFSQQREEDIYRFLKDNGPQRALVIAQALGMRTAKDVNRDLYRMKSRHLL | |
| | DMDEQSKAWTIYRPEDSGRRAKSASIIYQHNPINMICQNGPNSWISIANSEAI | |
| | QIGHGNIITRQTVSREDGSAGPRHLPSMAPGDSSTWGTLVDPWGPQDIHME | |
| | QSILRRVQLGHSNEMRLHGVPSEGPAHIPPGSPPVSATAAGPEASFEARIPSP | |
| | GTHPEGEAAQRIHMKSCFLEDATIGNSNKMSISPGVAGPGGVAGSGEGEPGE | |
| | DAGRRPADTQSRSHFPRDIGQPITPSHSKLTPKLETMTLGNRSHKAAEGSHY | |
| | VDEASHEGSWWGGGI | |
| 69 | MPGREGHLEQRILQVLTEAGSPVKLAQLVKECQAPKRELNQVLYRMKKEL | ZBP |
| | KVSLTSPATWCLGG | |
| 70 | PGREGHLEQRILQVLTEAGSPVKLAQLVKECQAPKRELNQVLYRMKKELKV | ZBP1 |
| | SLTSPATWCLGG | |
| 71 | MPQFSQQREEDIYRFLKDNGPQRALVIAQALGMRTAKDVNRDLYRMKSRH | ZBP1 |
| | LLDMDEQSKAWTIYR | |
| 72 | PQFSQQREEDIYRFLKDNGPQRALVIAQALGMRTAKDVNRDLYRMKSRHLL | ZBP1 |
| | DMDEQSKAWTIYR | |
| 73 | SPQFSQQREEDIYRFLKDNGPQRALVIAQALGMRTAKDVNRDLYRMKSRHL | ZBP1 |
| | LDMDEQSKAWTIYRWTIY | |
| 74 | MNPSAPSYPMASLYVGDLHPDVTEAMLYEKFSPAGPILSIRVCRDMITRRSL | PABP |
| | GYAYVNFQQPADAERALDTMNFDVIKGKPVRIMWSQRDPSLRKSGVGNIFI | |
| | KNLDKSIDNKALYDTFSAFGNILSCKVVCDENGSKGYGFVHFETQEAAERAI | |
| | EKMNGMLLNDRKVFVGRFKSRKEREAELGARAKEFTNVYIKNFGEDMDDE | |
| | RLKDLFGKFGPALSVKVMTDESGKSKGFGFVSFERHEDAQKAVDEMNGKE | |
| | LNGKQIYVGRAQKKVERQTELKRKFEQMKQDRITRYQGVNLYVKNLDDGI | |
| | DDERLRKEFSPFGTITSAKVMMEGGRSKGFGFVCFSSPEEATKAVTEMNGRI | |
| | VATKPLYVALAQRKEERQAHLTNQYMQRMASVRAVPNPVINPYQPAPPSG | |
| | YFMAAIPQTQNRAAYYPPSQIAQLRPSPRWTAQGARPHPFQNMPGAIRPAAP | |
| | RPPFSTMRPASSQVPRVMSTQRVANTSTQTMGPRPAAAAAAATPAVRTVPQ | |
| | YKYAAGVRNPQQHLNAQPQVTMQQPAVHVQGQEPLTASMLASAPPQEQK | |
| | QMLGERLFPLIQAMHPTLAGKITGMLLEIDNSELLHMLESPESLRSKVDEAV | |
| | AVLQAHQAKEAAQKAVNSATGVPTV | |
| 75 | NPSAPSYPMASLYVGDLHPDVTEAMLYEKFSPAGPILSIRVCRDMITRRSLG | PABP |
| | YAYVNFQQPADAERALDTMNFDVIKGKPVRIMWSQRDPSLRKSGVGNIFIK | |
| | NLDKSIDNKALYDTFSAFGNILSCKVVCDENGSKGYGFVHFETQEAAERAIE | |
| | KMNGMLLNDRKVFVGRFKSRKEREAELGARAKEFTNVYIKNFGEDMDDER | |
| | LKDLFGKFGPALSVKVMTDESGKSKGFGFVSFERHEDAQKAVDEMNGKEL | |
| | NGKQIYVGRAQKKVERQTELKRKFEQMKQDRITRYQGVNLYVKNLDDGID | |
| | DERLRKEFSPFGTITSAKVMMEGGRSKGFGFVCFSSPEEATKAVTEMNGRIV | |
| | ATKPLYVALAQRKEERQAHLTNQYMQRMASVRAVPNPVINPYQPAPPSGY | |
| | FMAAIPQTONRAAYYPPSQIAQLRPSPRWTAQGARPHPFQNMPGAIRPAAPR | |
| | PPFSTMRPASSQVPRVMSTQRVANTSTQTMGPRPAAAAAAATPAVRTVPQY | |
| | KYAAGVRNPQQHLNAQPQVTMQQPAVHVQGQEPLTASMLASAPPQEQKQ | |
| | MLGERLFPLIQAMHPTLAGKITGMLLEIDNSELLHMLESPESLRSKVDEAVA | |
| | VLQAHQAKEAAQKAVNSATGVPTV | |
| 76 | MSYPMASLYVGDLHPDVTEAMLYEKFSPAGPILSIRVCRDMITRRSLGYAY | PABP |
| | VNFQQPADAERALDTMNFDVIKGKPVRIMWSQRDPSLRKSGVGNIFIKNLD | |
| | KSIDNKALYDTFSAFGNILSCKVVCDENGSKGYGFVHFETQEAAERAIEKM | |
| | NGMLLNDRKVFVGRFKSRKER | |
| 77 | SYPMASLYVGDLHPDVTEAMLYEKFSPAGPILSIRVCRDMITRRSLGYAYVN | PABP |
| | FQQPADAERALDTMNFDVIKGKPVRIMWSQRDPSLRKSGVGNIFIKNLDKSI | |
| | DNKALYDTFSAFGNILSCKVVCDENGSKGYGFVHFETQEAAERAIEKMNG | |
| | MLLNDRKVFVGRFKSRKER | |
| 78 | MASLYVGDLHPDVTEAMLYEKFSPAGPILSIRVCRDMITRRSLGYAYVNFQ | PABP |
| | QPADAERALDTMNFDVIKGKPVRIMWSQR | |
| 79 | ASLYVGDLHPDVTEAMLYEKFSPAGPILSIRVCRDMITRRSLGYAYVNFQQP | PABP |
| | ADAERALDTMNFDVIKGKPVRIMWSQR | |
| 80 | MGNIFIKNLDKSIDNKALYDTFSAFGNILSCKVVCDENGSKGYGFVHFETQE | PABP |
| | AAERAIEKMNGMLLNDRKVFVGRFKS | |
| 81 | GNIFIKNLDKSIDNKALYDTFSAFGNILSCKVVCDENGSKGYGFVHFETQEA | PABP |
| | AERAIEKMNGMLLNDRKVFVGRFKS | |
| 82 | MTNVYIKNFGEDMDDERLKDLFGKFGPALSVKVMTDESGKSKGFGFVSFER | PABP |
| | HEDAQKAVDEMNGKELNGKQIYVGRAQK | |
| 83 | TNVYIKNFGEDMDDERLKDLFGKFGPALSVKVMTDESGKSKGFGFVSFERH | PABP |
| | EDAQKAVDEMNGKELNGKQIYVGRAQK | |
| 84 | MVNLYVKNLDDGIDDERLRKEFSPFGTITSAKVMMEGGRSKGFGFVCFSSP | PABP |
| | EEATKAVTEMNGRIVATKPLYVALAQR | |
| 85 | VNLYVKNLDDGIDDERLRKEFSPFGTITSAKVMMEGGRSKGFGFVCFSSPEE | PABP |
| | ATKAVTEMNGRIVATKPLYVALAQR | |
| 86 | KHPLQNRWALWFFKNDKSKTWQANLRLISKFDTVEDFWALYNHIQLSSNL | eIF4e |
| | MPGCDYSLFKDGIEPMWEDEKNKRGGRWLITLNKQQRRSDLDRFWLETLL | |
| | CLIGESFDDYSDDVCGAVVNVRAKGDKIAIWTTECENREAVTHIGRVYKER | |
| | LGLPPKIVIGYQSHADTATKSGSTTKNRFVV | |
| 87 | MKHPLQNRWALWFFKNDKSKTWQANLRLISKFDTVEDFWALYNHIQLSSN | eIF4e |
| | LMPGCDYSLFKDGIEPMWEDEKNKRGGRWLITLNKQQRRSDLDRFWLETL | |
| | LCLIGESFDDYSDDVCGAVVNVRAKGDKIAIWTTECENREAVTHIGRVYKE | |
| | RLGLPPKIVIGYQSHADTATKSGSTTKNRFVV | |
| 88 | MATVEPETTPTPNPPTTEEEKTESNQEVANPEHYIKHPLQNRWALWFFKND | eIF4e |
| | KSKTWQANLRLISKFDTVEDFWALYNHIQLSSNLMPGCDYSLFKDGIEPMW | |
| | EDEKNKRGGRWLITLNKQQRRSDLDRFWLETLLCLIGESFDDYSDDVCGAV | |
| | VNVRAKGDKIAIWTTECENREAVTHIGRVYKERLGLPPKIVIGYQSHADTAT | |
| | KSGSTTKNRFVV | |
| 89 | VRKIGELVRYLNTNPVGGLLEYARSHGFAAEFKLVDQSGPPHEPKFVYQAK | ADAR1 |
| | VGGRWFPAVCAHSKKQGKQEAADAALRVLIGENEKAER | |
| 90 | LEGKVKWFNSEKGFGFIEVEGQDDVFVHFSAIQGEGFKTLEEGQAVSFEIVE | Bs-CspB |
| | GNRGPQAANVTKEA | |
| 91 | GKKVIATKVLGTVKWFNVRNGYGFINRNDTKEDVFVHQTAIKKNNPRKYL | CSD-Ybox |
| | RSVGDGETVEFDVVEGEKGAEAANVTGP | |
| 92 | NTENKSQPKRLHVSNIPFRFRDPDLRQMFGQFGKILDVEIIFNERGSKGFGFV | FOX1 |
| | TFENSADADRAREKLHGTVVEGRKIEVNNATARVMTNKKTVNPYTN | |
| 93 | DSVYSGQQPSVGTEIFVGKIPRDLFEDELVPLFEKAGPIWDLRLMMDPLTGL | hnRNPQ1 |
| | NRGYAFVTFCTKEAAQEAVKLYNNHEIRSGKHIGVCISVANNRLFVGSIPKS | |
| | KTKEQILEEFSKVTEGLTDVILYHQPDDKKKNRGFCFLEYEDHKTAAQARR | |
| | RLMSGKVKVWGNVGTVEWADPIEDPDPEVMAKVKVLFVRNLANTVTEEIL | |
| | EKAFSQFGKLERVKKLKDYAFIHFDERDGAVKAMEEMNGKDLEGENIEIVF | |
| | AKPPD | |
| 94 | MSELSVAQKPEKLLERCKYWPACKNGDECAYHHPISPCKAFPNCKFAEKCL | HsZC3H14 |
| | FVHPNCKYDAKCTKPDCPFTHVSRRIPVLSPKPAVAPPAPPSSSQLCRYFPAC | |
| | KKMECPFYHPKHCRFNTQCTRPDCTFYHPTINVPPRHALKWIRPQTSE | |
| 95 | SELSVAQKPEKLLERCKYWPACKNGDECAYHHPISPCKAFPNCKFAEKCLF | HsZC3H14 |
| | VHPNCKYDAKCTKPDCPFTHVSRRIPVLSPKPAVAPPAPPSSSQLCRYFPACK | |
| | KMECPFYHPKHCRFNTQCTRPDCTFYHPTINVPPRHALKWIRPQTSE | |
| 96 | ATVEPETTPTPNPPTTEEEKTESNQEVANPEHYIKHPLQNRWALWFFKNDKS | eIF4e |
| | KTWQANLRLISKFDTVEDFWALYNHIQLSSNLMPGCDYSLFKDGIEPMWED | |
| | EKNKRGGRWLITLNKQQRRSDLDRFWLETLLCLIGESFDDYSDDVCGAVVN | |
| | VRAKGDKIAIWTTECENREAVTHIGRVYKERLGLPPKIVIGYQSHADTATKS | |
| | GSTTKNRFVV | |
| 97 | GAIEDPELEAIKARVREMEEEAEKLKELQNEVEKQMNMSPPPGNAGPVIMSI | PABPN1 |
| | EEKMEADARSIYVGNVDYGATAEELEAHFHGCGSVNRVTILCDKFSGHPKG | |
| | FAYIEFSDKESVRTSLALDESLFRGRQIKVIPKRTNRPGISTTDRGFPRARYRA | |
| | RTTNYNSSRSRFYSGFNSRPRGRVYRG | |
| 98 | GNSVTYSTLISGLGKAGRLEEALELFEEMKEKGIVPTVVTYTTLINGLGKAG | PPRpA |
| | KLDEALELFEEMKEKGLVPNIVTYTSLINGLGKAGRVEEALELFDEMKERG | |
| | VVPNVVTFSTLISGFARAGRLEEALELFEEMKEKGIVPSVVTYTTLIDGLCKA | |
| | GKLDEALKLFEEMVEKGIKPNVVTYTTLIDGLGRAGKLDEALKLFEEMVEK | |
| | GIKPNVVTYSTLIDGLCKAGKLDEALKLFEEMVEKGIKPTVELTYRRVVESY | |
| | CRAKRFE | |
| 99 | GRSRLLEDFRNNRYPNLQLREIAGHIMEFSQDQHGSRFIQLKLERATPAERQ | PUFpA |
| | LVFNEILQAAYQLMVDVFGVFVIQKFFEFGSLEQKLALAERIRGHVLSLALQ | |
| | MYGTRVIQKALEFIPSDQQNEMVRELDGHVLKCVKDQNGRGVVYKCIECV | |
| | QPQSLQFIIDAFKGQVFALSTHPYGPHVIQRILEHCLPDQTLPILEELHQHTEQ | |
| | LVQDQYGVWVIHHVLEHGRPEDKSKIVAEIRGNVLVLSQHKFAMHVVQKC | |
| | VTHASRTERAVLIDEVCTMNDGPHSALYTMMKDQYAQLVVRKMIDVAEPG | |
| | QRKIVMHKIRPHIATLRKYTYGKHILAKLEKYYMKNGVDLG | |
| 100 | DKKSPISQVHEIGIKRNMTVHFKVLREEGPAHMKNFITACIVGSIVTEGEGNG | Staufen |
| | KKVSKKRAAEKMLVELQKL | |
| 101 | YVCHFENCGKAFKKHNQLKVHQFSHTQQLPYECPHEGCDKRFSLPSRLKRH | ZNF |
| | EKVHAGYPCKKDDSCSFVGKTWTLYLKHVAECHQD | |
| 102 | MHRGNEDLSFGDDYEKEIGLLLGEQQRRQEEADEIEKELNLYRSGSAPPTVD | PUM-HD |
| | GSVNAAGGLFNGGGRGPFMEFGGGNKGNGFGGDDDELRKDPAYLSYYYA | |
| | NMKLNPRLPPPLMSREDLRVAQRLKGSSNVLGGVGDRRNVNESRSLFSMPP | |
| | GFDQMNEFEAEKTNASSSEWDANGLIGLPGLGLGGKQKSFADIFQPDMGHP | |
| | VSQQPSRPASRNAFDENVDSTNNQSPSASQGIGAPPPYSYAAVLGSSLSRNG | |
| | TPDPQAVARVPSPCLTPIGSGRVSSNDKRNTSNQSPFNGVTSGLNESSDLVN | |
| | ALSGMNLSGSGGLDDRGQAEQDVEKVRNYMFGFQGGHNEVSQHVFPNKS | |
| | DQAQKATGSLRNLHMRGSQGSAYNGGGLANPYQHLDSPNYCLNNYALNP | |
| | AVASVMANQLGNSNFSPMYDNYSAASALGFSGMDSRLHGGGFESRNLGRS | |
| | NRMMGGGGLQSHMADPMYHQYGRYSENVDALDLLNDPAMDRSFMGNSY | |
| | MNMLELQRAYLGAQKSQYGVPYKSGSPNSHSYYGSPTFGSNMSYPGSPLA | |
| | HHAMQNSLMSPCSPMRRGEVNMRYPSATRNYSGGVMGSWHMDASLDEGF | |
| | GSSLLEEFKSNKTRGFELSEIAGHVVEFSADQYGSRFIQQKLETATTDEKNM | |
| | VYEEIMPHALALMTDVFGNYVIQKFFEHGLPPQRRELGDKLFENVLPLSLQ | |
| | MYGCRVIQKAIEVVDLDQKIKMVKELDGHVMRCVRDQNGNHVVQKCIEC | |
| | VPEENIEFIISTFFGHVVSLSTHPYGCRVIQRVLEHCHDPDTQSKVMEEILSTV | |
| | SMLAQDQYGNYVVQHVLEHGKPDERTVIIKELAGKIVQMSQQKFASNVVE | |
| | KCLTFGGPEERELLVNEMLGTTDENEPLQAMMKDQFANYVVQKVLETCDD | |
| | QQRELILTRIKVHLNALKKYTYGKHVVARIEKLVAAGGMHMFLLFPLGLKE | |
| | ENGFAVPNPASDVVRPQVLYSLTRVDGSAIAF | |
| 103 | HRGNEDLSFGDDYEKEIGLLLGEQQRRQEEADEIEKELNLYRSGSAPPTVDG | PUM-HD |
| | SVNAAGGLFNGGGRGPFMEFGGGNKGNGFGGDDDELRKDPAYLSYYYAN | |
| | MKLNPRLPPPLMSREDLRVAQRLKGSSNVLGGVGDRRNVNESRSLFSMPPG | |
| | FDQMNEFEAEKTNASSSEWDANGLIGLPGLGLGGKQKSFADIFQPDMGHPV | |
| | SQQPSRPASRNAFDENVDSTNNQSPSASQGIGAPPPYSYAAVLGSSLSRNGTP | |
| | DPQAVARVPSPCLTPIGSGRVSSNDKRNTSNQSPFNGVTSGLNESSDLVNAL | |
| | SGMNLSGSGGLDDRGQAEQDVEKVRNYMFGFQGGHNEVSQHVFPNKSDQ | |
| | AQKATGSLRNLHMRGSQGSAYNGGGLANPYQHLDSPNYCLNNYALNPAV | |
| | ASVMANQLGNSNFSPMYDNYSAASALGFSGMDSRLHGGGFESRNLGRSNR | |
| | MMGGGGLQSHMADPMYHQYGRYSENVDALDLLNDPAMDRSFMGNSYMN | |
| | MLELQRAYLGAQKSQYGVPYKSGSPNSHSYYGSPTFGSNMSYPGSPLAHHA | |
| | MQNSLMSPCSPMRRGEVNMRYPSATRNYSGGVMGSWHMDASLDEGFGSS | |
| | LLEEFKSNKTRGFELSEIAGHVVEFSADQYGSRFIQQKLETATTDEKNMVYE | |
| | EIMPHALALMTDVFGNYVIQKFFEHGLPPQRRELGDKLFENVLPLSLQMYG | |
| | CRVIQKAIEVVDLDQKIKMVKELDGHVMRCVRDQNGNHVVQKCIECVPEE | |
| | NIEFIISTFFGHVVSLSTHPYGCRVIQRVLEHCHDPDTQSKVMEEILSTVSMLA | |
| | QDQYGNYVVQHVLEHGKPDERTVIIKELAGKIVQMSQQKFASNVVEKCLTF | |
| | GGPEERELLVNEMLGTTDENEPLQAMMKDQFANYVVQKVLETCDDQQRE | |
| | LILTRIKVHLNALKKYTYGKHVVARIEKLVAAGGMHMFLLFPLGLKEENGF | |
| | AVPNPASDVVRPQVLYSLTRVDGSAIAF | |

Polypeptides with Phase Behavior

[0133] In embodiments, the fusion proteins described herein comprise one or more polypeptides with phase behavior. In embodiments, the fusion proteins described herein comprise from 1 to 2, from 1 to 3, from 1 to 4, from 1 to 5, from 1 to 6, from 1 to 7, from 1 to 8, from 1 to 9, from 1 to 10, from 1 to 15, from 1 to 20, from 1 to 25, from 1 to 30, from 1 to 35, from 1 to 40, from 1 to 45, or from 1 to 50 polypeptides with phase behavior. In embodiments, the fusion proteins comprise 1, about 2, about 3, about 4, about 5, about 6, about 7, about 8, about 9, about 10, about 11, about 12, about 13, about 14, about 15, about 16, about 17, about 18, about 19, about 20, about 21, about 22, about 23, about 24, about 25, about 26, about 27, about 28, about 29, about 30, about 31, about 32, about 33, about 34, about 35, about 36, about 37, about 38, about 39, about 40, about 41, about 42, about 43, about 44, about 45, about 46, about 47, about 48, about 49, or about 50 polypeptides with phase behavior.

[0134] In embodiments, the polypeptide with phase behavior is a resilin-like polypeptide (RLP). Resilin-like polypeptides are elastomeric polypeptides with mechanical properties including desirable resilience, compressive elastic modulus, tensile elastic modulus, shear modulus, extension to break, maximum tensile strength, hardness, rebound, and compression set. In embodiments, the resilin-like polypeptides described herein are polymers which comprise one or more repeats. In embodiments, the polymeric repeats may have an amino acid sequence selected from any one of SEQ ID NOS: 1-9.

[0135] In embodiments, a resilin-like polypeptide comprises more than one type of repeat, e.g. a repeat of SEQ ID NO: 1 and a repeat of SEQ ID NO: 3.

[0136] In embodiments, the resilin-like polypeptides described herein comprise repeats that occur up to 500 times within a given RLP. In embodiments, the repeats occur about 1, about 2, about 3, about 4, about 5, about 6, about 7, about 8, about 9, about 10, about 20, about 30, about 40, about 50, about 60, about 70, about 80, about 90, about 100, about 110, about 120, about 130, about 140, about 150, about 160, about 170, about 180, about 190, about 200, about 210, about 220, about 230, about 240, about 250, about 260, about 270, about 280, about 290, about 300, about 310, about 320, about 330, about 340, about 350, about 360, about 370, about 380, about 390, about 400, about 450, or about 500 times.

[0137] In embodiments, the RLP comprises one or more partial repeats. In embodiments, the length of a partial repeat is 1, 2, 3, 4, 5, 6, 7, 8, 9, 10, or more amino acids. In embodiments, the RLP comprises one or more additional amino acids at the N-terminus or C-terminus of the RLP that are not part of a repeat.

[0138] In embodiments, one or more RLP repeats are scrambled, i.e., they contain a different amino acid sequence but retain the same amino acid composition. For example, a repeat may have a different amino acid sequence than SEQ ID NO: 8, but retain the same amino acid composition. In embodiments, the polypeptide with phase behavior is an elastin-like polypeptide. Elastin-like polypeptides (ELPs) are biopolymers derived from tropoelastin. In embodiments, the polypeptide with phase behavior comprises a P and G motif, comprising a plurality of P residues and a plurality of G residues. In embodiments, the P and G motif comprises at least about 10% proline and at least about 20% glycine. In embodiments, the elastin-like polypeptides described herein are polymers comprising a pentapeptide repeat having the sequence (Val-Pro-Gly-Xaa-Gly)n (SEQ ID NO: 217). In embodiments, n is 1, 2, 3, 4, 5, 6, 7, 8, 9, 10, 11, 12, 13, 14, 15, 16, 17, 18, 19, 20, 21, 22, 23, 24, 25, 26, 27, 28, 29, 30, 31, 32, 33, 34, 35, 36, 37, 38, 39, 40, 41, 42, 43, 44, 45, 46, 47, 48, 49, 50, 51, 52, 53, 54, 55, 56, 57, 58, 59, 60, 61, 62, 63, 64, 65, 66, 67, 68, 69, 70, 71, 72, 73, 74, 75, 76, 77, 78, 79, 80, 81, 82, 83, 84, 85, 86, 87, 88, 89, 90, 91, 92, 93, 94, 95, 96, 97, 98, 99, 100, 101, 102, 103, 104, 105, 106, 107, 108, 109, 110, 111, 112, 113, 114, 115, 116, 117, 118, 119, 120, 121, 122, 123, 124, 125, 126, 127, 128, 129, 130, 131, 132, 133, 134, 135, 136, 137, 138, 139, 140, 141, 142, 143, 144, 145, 146, 147, 148, 149, 150, 160, 170, 180, 190, 200, 210, 220, 230, 240, 250, 260, 270, 280, 290, 300, 310, 320, 330, 340, 350, 360, 370, 380, 390, 400, 410, 420, 430, 440, 450, 460, 470, 480, 490, or 500, including all values and ranges in between. In embodiments, n is an integer from 1 to 360, inclusive of endpoints. In embodiments, the polypeptide with phase behavior comprises an amino acid sequence selected from:

a.
(SEQ ID NO: 1)
(GRGDSPY)ₙ
b.
(SEQ ID NO: 2)
(GRGDSPH)ₙ
c.
(SEQ ID NO: 3)
(GRGDSPV)ₙ
d.
(SEQ ID NO: 4)
(GRGDSPYG)ₙ
e.
(SEQ ID NO: 5)
(RPLGYDS)ₙ
f.
(SEQ ID NO: 6)
(RPAGYDS)ₙ
g.
(SEQ ID NO: 7)
(GRGDSYP)ₙ
h.
(SEQ ID NO: 8)
(GRGDSPYQ)ₙ
i.
(SEQ ID NO: 9)
(GRGNSPYG)ₙ
j.
(SEQ ID NO: 10)
(GVGVP)ₙ;
k.
(SEQ ID NO: 11)
(GVGVPGLGVPGVGVPGLGVPGVGVP)ₘ;
l.
(SEQ ID NO: 12)
(GVGVPGVGVPGAGVPGVGVPGVGVP)ₘ;
m.
(SEQ ID NO: 13)
(GVGVPGWGVPGVGVPGWGVPGVGVP)ₘ;
n.
(SEQ ID NO: 14)
(GVGVPGVGVPGVGVPGVGVPGVGVPGVGVPGEGVPGFGVPGVGVP)ₘ;
o.
(SEQ ID NO: 15)
(GVGVPGVGVPGVGVPGVGVPGVGVPGVGVPGKGVPGFGVPGVGVP)ₘ;
and
p.
(SEQ ID NO: 16)
(GAGVPGVGVPGAGVPGVGVPGAGVP)ₘ;

[0139] or a randomized, scrambled analog thereof. In embodiments, n is an integer in the range of 1-500 (1, 20, 40, 60, 80, 100, 120, 140, 160, 180, 200, 220, 240, 260, 280, 300, 320, 340, 360, 380, 400, 420, 440, 460, 480, or 500, including any values or ranges therein). In embodiments, the n is an integer in the range of 20-360, inclusive of endpoints. In embodiments, m is an integer in the range of 1-100 (1, 10, 20, 30, 40, 50, 60, 70, 80, 90, or 100, including any values of ranges therein.) In embodiments, m is an integer in the range of 4-25, inclusive of endpoints.

[0140] In embodiments, the polypeptide with phase behavior comprises an amino acid sequence selected from: (GVGVP)ₘ (SEQ ID NO: 22); (ZZPXXXXGZ)ₘ (SEQ ID NO: 23); (ZZPXGZ)ₘ (SEQ ID NO: 24); (ZZPXXGZ)ₘ (SEQ ID NO: 25); or (ZZPXXXGZ)ₘ (SEQ ID NO: 26), wherein m is an integer between 10 and 160, inclusive of endpoints, wherein X if present is any amino acid except proline or glycine, and wherein Z if present is any amino acid. In embodiments, the polypeptide with phase behavior comprises an amino acid sequence selected from: (GVGVPGVGVPGAGVPGVGVPGVGVP)m (SEQ ID NO: 17); or (GVGVPGVGVPGLGVPGVGVPGVGVP)ₘ (SEQ ID NO: 18); wherein m is an integer between 2 and 32, inclusive of endpoints. the polypeptide with phase behavior comprises an amino acid sequence selected from: (GVGVPGVGVPGAGVPGVGVPGVGVP)ₘ (SEQ ID NO: 19), wherein m is 8 or 16; (GVGVPGAGVP)ₘ (SEQ ID NO: 20), wherein m is an integer between 5 and 80, inclusive of endpoints; or (GXGVP)ₘ (SEQ ID NO: 21), wherein m is an integer between 10 and 160, inclusive of endpoints, and wherein X for each repeat is independently selected from the group consisting of glycine, alanine, valine, isoleucine, leucine, phenylalanine, tyrosine, tryptophan, lysine, arginine, aspartic acid, glutamic acid, and serine. In embodiments, m is an integer in the range of 1-100 (1, 10, 20, 30, 40, 50, 60, 70, 80, 90, or 100, including any values of ranges therein.)

[0141] In embodiments, the pentapeptide repeat is scrambled, for example it comprises a different amino acid sequence but maintains the same amino acid composition. For example, an ELP may comprise a different amino acid sequence than SEQ ID NO: 217, but maintains the same amino acid composition, e.g. 40% of the sequence is glycine, 20% of the sequence is Xaa, 20% of the sequence is proline, and 20% of the sequence is valine.

[0142] In embodiments, the ELP comprises one or more partial repeats. In embodiments, the length of a partial repeat is 1, 2, 3, or 4 amino acids. In embodiments, the ELP comprises one or more additional amino acids at the N-terminus or C-terminus of the ELP that are not part of a repeat.

[0143] ELPs and RLPs undergo a phase transition in response to an environmental factor. ELPs and RLPs retain their ability to undergo a phase transition when coupled to one or more polypeptides (such as one or more NBP), or expressed as a fusion protein with one or more other polypeptides (such as one or more NBP). Polymers like ELPs and RLPs exhibit a transition temperature (Tt), also referred to as a cloud point temperature (Tc). In some embodiments ELPs and RLPs undergo a reversible phase transition from a soluble to an insoluble phase at the Tt. ELPs that transition from a soluble to an insoluble phase with heating or an increase in salt concentration have a Tt referred to as a lower critical solution temperature (LCST). RLPs that transition from a soluble to an insoluble phase with cooling or a decrease in salt concentration have a Tt referred to as a lower critical solution temperature (UCST). In embodiments, the phase transition results from a change in secondary structure of the ELP and/or RLP. For example, the phase transition of an ELP results from a change in secondary structure from a random coil (below the Tt) to a type II β-turn. In embodiments, the change in secondary structure is characterized by a method selected from circular dichroism spectropolarimetry, small angle x-ray scattering, and cryo-electron microscopy, ultraviolet-visible spectrophotometry, static light scattering, dynamic light scattering, nuclear magnetic resonance spectroscopy, solid-state nuclear magnetic resonance spectroscopy, infrared spectroscopy, Fourier transform infrared spectroscopy (FTIR), microscopy, and small angle neutron scattering. In embodiments, the phase transition of an ELP does not result from a chance in secondary structure.

[0144] In embodiments, the RLPs and ELPs described herein have a transition temperature between about 0° C. and about 100° C. In embodiments, the RLPs and ELPs described herein have a transition temperature between about 10° C. and about 50° C. In some embodiments the transition temperature is about 0° C., about 1° C., about 2° C., about 3° C., about 4° C., about 5° C., about 6° C., about 7° C., about 8° C., about 9° C., about 10° C., about 11° C., about 12° C., about 13° C., about 14° C., about 15° C., about 16° C., about 17° C., about 18° C., about 19° C., about 20° C., about 21° C., about 22° C., about 23° C., about 24° C., about 25° C., about 26° C., about 27° C., about 28° C., about 29° C., about 30° C., about 31° C., about 32° C., about 33° C., about 34° C., about 35° C., about 36° C., about 37° C., about 38° C., about 39° C., about 40° C., about 41° C., about 42° C., about 43° C., about 44° C., about 45° C., about 46° C., about 47° C., about 48° C., about 49° C., about 50° C., about 51° C., about 52° C., about 53° C., about 54° C., about 55° C., about 56° C., about 57° C., about 58° C., about 59° C., about 60° C., about 61° C., about 62° C., about 63° C., about 64° C., about 65° C., about 66° C., about 67° C., about 68° C., about 69° C., about 70° C., about 71° C., about 72° C., about 73° C., about 74° C., about 75° C., about 76° C., about 77° C., about 78° C., about 79° C., about 80° C., about 81° C., about 82° C., about 83° C., about 84° C., about 85° C., about 86° C., about 87° C., about 88° C., about 89° C., about 90° C., about 91° C., about 92° C., about 93° C., about 94° C., about 95° C., about 96° C., about 97° C., about 98° C., about 99° C., or about 100° C. In embodiments, the RLPs described herein have a transition temperature from about 10° C. to about 100° C.

[0145] In embodiments, the Tt of the RLPs and ELPs described herein is modulated by manipulating the primary structure e.g. amino acid sequence of the RLP and ELP. In embodiments, the hydrophobicity of the ELP or RLP is modulated. In embodiments, the hydrophobicity of the ELP is modified by altering the identity of the guest residue Xaa. In embodiments, the hydrophobicity of the ELP or RLP is increased resulting in a decreased Tt. In embodiments, the hydrophobicity of the ELP or RLP is decreased resulting in an increased Tt. In embodiments, the polarity of the ELP or RLP is modulated. In embodiments, the polarity of the ELP is modulated by altering the identity of the guest residue Xaa. In embodiments, the polarity of the ELP or RLP is increased resulting in an increased Tt. In embodiments, the polarity of the ELP or RLP is decreased resulting in a decreased Tt.

[0146] In embodiments, the number of ELP pentapeptide repeats (n) is modulated to alter the Tt. In embodiments, n of the pentapeptide repeat (Val-Pro-Gly-Xaa-Gly)n (SEQ ID NO: 217) is an integer from 1 to 500, inclusive of endpoints. In embodiments, n is 1, 2, 3, 4, 5, 6, 7, 8, 9, 10, 11, 12, 13, 14, 15, 16, 17, 18, 19, 20, 21, 22, 23, 24, 25, 26, 27, 28, 29, 30, 31, 32, 33, 34, 35, 36, 37, 38, 39, 40, 41, 42, 43, 44, 45, 46, 47, 48, 49, 50, 51, 52, 53, 54, 55, 56, 57, 58, 59, 60, 61, 62, 63, 64, 65, 66, 67, 68, 69, 70, 71, 72, 73, 74, 75, 76, 77, 78, 79, 80, 81, 82, 83, 84, 85, 86, 87, 88, 89, 90, 91, 92, 93, 94, 95, 96, 97, 98, 99, 100, 101, 102, 103, 104, 105, 106, 107, 108, 109, 110, 111, 112, 113, 114, 115, 116, 117, 118, 119, 120, 121, 122, 123, 124, 125, 126, 127, 128, 129, 130, 131, 132, 133, 134, 135, 136, 137, 138, 139, 140, 141, 142, 143, 144, 145, 146, 147, 148, 149, 150, 160, 170, 180, 190, 200, 210, 220, 230, 240, 250, 260, 270, 280, 290, 300, 310, 320, 330, 340, 350, 360, 370, 380, 390, 400, 410, 420, 430, 440, 450, 460, 470, 480, 490, or 500, including all values and ranges in between.

[0147] In embodiments, Xaa also referred to herein as “the guest residue” is any amino acid that does not eliminate the phase behavior of the ELP. In embodiments, Xaa is any amino acid except proline. In embodiments, Xaa is independently selected for each repeat. For example, a given ELP may contain the guest residues alanine, glycine, and valine at a ratio of 8:7:1. In some embodiments Xaa is selected from the group consisting of alanine, arginine, asparagine, aspartic acid, cysteine, glutamic acid, glutamine, glycine, histidine, isoleucine, leucine, lysine, methionine, phenylalanine, praline, serine, threonine, tryptophan, tyrosine and valine. In embodiments, Xaa is a non-classical amino acid selected from the group consisting of 2,4-diaminobutyric acid, α-amino-isobutyric acid, alloisoleucine, 4-aminobutyric acid, 2-amino butyric acid (Abu), ε-Ahx, 6-amino hexanoic acid, 2-amino isobutyric acid (Aib), 3-amino propionic acid, ornithine, norleucine, norvaline, hydroxyproline, sarcosine, citrulline, homocitrulline, cysteic acid, t-butylglycine, t-butylalanine, phenylglycine, cyclohexylalanine, β-alanine, fluoro-amino acids, designer amino acids such as β-methyl amino acids, Cα-methyl amino acids, Na-methyl amino acids, and amino acid analogs in general. In embodiments, Xaa is the D-isomer of a natural or non-classical amino acid.

[0148] In embodiments, the Tt of the RLPs and ELPs described herein is modulated by introducing one or more environmental factors to the composition containing the RLP and/or ELP. In embodiments, the Tt of the ELPs and/or RLPs is modulated by adjusting the ionic strength of solvents. In embodiments, the ionic strength of the solvent is adjusted by adding salt. In embodiments, ELPs and/or RLPs contain lower Tt in solvents containing anions categorized as kosmotropes. Anions that are kosmotropes are highly hydrated and influence the water shield on ELPs and/or RLPs. In embodiments, the Tt of ELPs and/or RLPs can be adjusted through the addition of anions that are chaotropes. At low concentrations, the addition of chaotropes increase the Tt of the ELP and/or RLP. At high concentrations, the addition of a chaotrope decreases the Tt of the ELP and/or RLP. In embodiments, the Tt of the ELP and/or RLP can be tuned by introducing one or more reagents that disrupts hydrogen bonds. Non-limiting examples of reagents that disrupt hydrogen bonds include sodium dodecyl sulfate (SDS) and urea. In embodiments, reagents that enhance hydrogen bond formation are utilized to modulate the Tt. In embodiments, reagents that enhance hydrophobic interactions are utilized to modulate the Tt. Trifluoroethanol is a reagent which enhances both hydrophobic interactions and hydrogen bond formation, causing a decrease in Tt.

[0149] In embodiments, the ELP and/or RLP concentration can be adjusted to modulate Tt. In embodiments, a higher ELP and/or RLP concentration results in a reduced Tt. In embodiments, a lower ELP and/or RLP concentration results in an increased Tt.

[0150] In addition, modulation of pH, light, and ion concentrations also can be utilized to modulate Tt.

[0151] In embodiments, modulation of the number of (e.g. addition or removal) charged amino acids (e.g. histidine, lysine, arginine, glutamic acid, aspartic acid, ornithine, or other non-natural charged amino acids) and identity (e.g. positively or negatively charged) enables tuning of the Tt through pH modulation.

[0152] In embodiments, the ELPs and/or RLPs described herein are block copolymers. A block copolymer comprises two or more sequence domains or blocks, in which two or more blocks contain different properties. Non-limiting examples of properties that can be tuned include hydrophilicity, hydrophobicity, polarity, and secondary structure. In embodiments, the block copolymer is an amphiphile, e.g. it comprises at least one hydrophobic and at least one hydrophilic block.

[0153] In embodiments, the ELPs and/or RLPs described herein assemble into various morphologies. Non-limiting examples of morphologies include a spherical aggregate, a micelle, a vesicle, a fibril, a nanofibril, a nanotube, and a hydrogel. In embodiments, the RLPs and/or ELPs described herein assemble into various morphologies after the addition of an environmental factor. In embodiments, the RLPs and/or ELPs described herein change from one morphology to another morphology after the addition of an environmental factor. In embodiments, the RLPs and/or ELPs described herein change from one morphology to another morphology after the addition of a nucleic acid.

[0154] In embodiments, addition of an environmental factor causes an RLP and/or ELP to undergo a phase transition. In embodiments, at the RLP and/or ELP phase transition, the RLP and/or ELP converts from one morphology to another morphology.

[0155] In embodiments, a phase transition of an RLP and/or ELP causes the formation of dense, liquid, droplets.

[0156] In embodiments, the polypeptide with phase behavior comprises an amino acid sequence selected from Table 2. In embodiments, the polypeptide with phase behavior has at least 90% identity with a polypeptide of any one of SEQ ID NOs: 56, and 262-264. In embodiments, the polypeptide with phase behavior has at least 90% identity with a polypeptide of SEQ ID NO: 56. In embodiments, the polypeptide with phase behavior comprises any one of SEQ ID NOs: 56, and 262-264. In embodiments, the polypeptide with phase behavior comprises SEQ ID NO: 56.

TABLE 2
Exemplary amino acid sequences of polypeptides with phase behavior.

| SEQ ID | |
|---|---|
| NO | Sequence |
| 1 | (GRGDSPY)n, wherein n is an integer in the range of 1-500, inclusive of endpoints |
| 2 | (GRGDSPH)n, wherein n is an integer in the range of 1-500, inclusive of endpoints |
| 3 | (GRGDSPV)n, wherein n is an integer in the range of 1-500, inclusive of endpoints |
| 4 | (GRGDSPYG)n, wherein n is an integer in the range of 1-500, inclusive of endpoints |
| 5 | (RPLGYDS)n, wherein n is an integer in the range of 1-500, inclusive of endpoints |
| 6 | (RPAGYDS)n, wherein n is an integer in the range of 1-500, inclusive of endpoints |
| 7 | (GRGDSYP)n, wherein n is an integer in the range of 1-500, inclusive of endpoints |
| 8 | (GRGDSPYQ)n, wherein n is an integer in the range of 1-500, inclusive of endpoints |
| 9 | (GRGNSPYG)n, wherein n is an integer in the range of 1-500, inclusive of endpoints |
| 10 | (GVGVP)n, wherein n is an integer in the range of 1-500, inclusive of endpoints |
| 11 | (GVGVPGLGVPGVGVPGLGVPGVGVP)m, wherein m is an integer in the range of 4-25, |
| | inclusive of endpoints |
| 12 | (GVGVPGVGVPGAGVPGVGVPGVGVP)m, wherein m is an integer in the range of 4-25, |
| | inclusive of endpoints |
| 13 | (GVGVPGWGVPGVGVPGWGVPGVGVP)m, wherein m is an integer in the range of 4-25, |
| | inclusive of endpoints |
| 14 | (GVGVPGVGVPGVGVPGVGVPGVGVPGVGVPGEGVPGFGVPGVGVP)m, wherein m is |
| | an integer in the range of 4-25, inclusive of endpoints |
| 15 | (GVGVPGVGVPGVGVPGVGVPGVGVPGVGVPGKGVPGFGVPGVGVP)m, wherein m is |
| | an integer in the range of 4-25, inclusive of endpoints |
| 16 | (GAGVPGVGVPGAGVPGVGVPGAGVP)m, wherein m is an integer in the range of 4-25, |
| | inclusive of endpoints |
| 17 | (GVGVPGVGVPGAGVPGVGVPGVGVP)m, wherein m is an integer between 2 and 32, |
| | inclusive of endpoints |
| 18 | (GVGVPGVGVPGLGVPGVGVPGVGVP)m, wherein m is an integer between 2 and 32, |
| | inclusive of endpoints |
| 19 | (GVGVPGVGVPGAGVPGVGVPGVGVP)m, wherein m is 8 or 16 |
| 20 | (GVGVPGAGVP)m, wherein m is an integer between 5 and 80, inclusive of endpoints |
| 21 | (GXGVP)m, wherein m is an integer between 10 and 160, inclusive of endpoints, and |
| | wherein X for each repeat is independently selected from the group consisting of |
| | glycine, alanine, valine, isoleucine, leucine, phenylalanine, tyrosine, tryptophan, |
| | lysine, arginine, aspartic acid, glutamic acid, and serine. |
| 22 | (GVGVP)m, wherein m is an integer between 10 and 160, inclusive of endpoints |
| 23 | (ZZPXXXXGZ)m, wherein m is an integer between 10 and 160, inclusive of endpoints, |
| | wherein X if present is any amino acid except proline or glycine, and wherein Z if |
| | present is any amino acid |
| 24 | (ZZPXGZ)m, wherein m is an integer between 10 and 160, inclusive of endpoints, wherein |
| | X if present is any amino acid except proline or glycine, and wherein Z if present is |
| | any amino acid |
| 25 | (ZZPXXGZ)m, wherein m is an integer between 10 and 160, inclusive of endpoints, wherein |
| | X if present is any amino acid except proline or glycine, and wherein Z if present is |
| | any amino acid |
| 26 | (ZZPXXXGZ)m, wherein m is an integer between 10 and 160, inclusive of endpoints, |
| | wherein X if present is any amino acid except proline or glycine, and wherein Z if |
| | present is any amino acid |
| 27 | (GVGVP)m, wherein m is 20, 40, or 80 |
| 28 | (GRGDXPZX)m, wherein X is glutamine or serine, Z is tyrosine or valine, and m is an |
| | integer between 10 and 160, inclusive of endpoints |
| 29 | (XZPXDGRG)m, wherein X is glutamine or serine, Z is tyrosine or valine, and m is an |
| | integer between 10 and 160, inclusive of endpoints |
| 30 | (GRGDXPZX)40 |
| 31 | (GVGVP)80 |
| 32 | GRGDQPYQGRGDQPYQGRGDQPYQGRGDQPYQGRGDQPYQGRGDQPYQGRGDQPYQ |
| | GRGDQPYQGRGDQPYQGRGDQPYQGRGDQPYQGRGDQPYQGRGDQPYQGRGDQPYQ |
| | GRGDQPYQGRGDQPYQGRGDQPYQGRGDQPYQGRGDQPYQGRGDQPYQGRGDQPYQ |
| | GRGDQPYQGRGDQPYQGRGDQPYQGRGDQPYQGRGDQPYQGRGDQPYQGRGDQPYQ |
| | GRGDQPYQGRGDQPYQGRGDQPYQGRGDQPYQGRGDQPYQGRGDQPYQGRGDQPYQ |
| | GRGDQPYQGRGDQPYQGRGDQPYQGRGDQPYQGRGDQPYQGVGVPGVGVPGVGVPG |
| | VGVPGVGVPGVGVPGVGVPGVGVPGVGVPGVGVPGVGVPGVGVPGVGVPGVGVPGV |
| | GVPGVGVPGVGVPGVGVPGVGVPGVGVPGVGVPGVGVPGVGVPGVGVPGVGVPGVG |
| | VPGVGVPGVGVPGVGVPGVGVPGVGVPGVGVPGVGVPGVGVPGVGVPGVGVPGVGV |
| | PGVGVPGVGVPGVGVPGVGVPGVGVPGVGVPGVGVPGVGVPGVGVPGVGVPGVGVP |
| | GVGVPGVGVPGVGVPGVGVPGVGVPGVGVPGVGVPGVGVPGVGVPGVGVPGVGVPG |
| | VGVPGVGVPGVGVPGVGVPGVGVPGVGVPGVGVPGVGVPGVGVPGVGVPGVGVPGV |
| | GVPGVGVPGVGVPGVGVPGVGVPGVGVPGVGVPGVGVPGVGVPGVGVP |
| 33 | (GVGVPGLGVPGVGVPGLGVPGVGVP)m, wherein m is 16 |
| 34 | GVGVPGLGVPGVGVPGLGVPGVGVPGVGVPGLGVPGVGVPGLGVPGVGVPGVGVPGL |
| | GVPGVGVPGLGVPGVGVPGVGVPGLGVPGVGVPGLGVPGVGVPGVGVPGLGVPGVGV |
| | PGLGVPGVGVPGVGVPGLGVPGVGVPGLGVPGVGVPGVGVPGLGVPGVGVPGLGVPG |
| | VGVPGVGVPGLGVPGVGVPGLGVPGVGVPGVGVPGLGVPGVGVPGLGVPGVGVPGVG |
| | VPGLGVPGVGVPGLGVPGVGVPGVGVPGLGVPGVGVPGLGVPGVGVPGVGVPGLGVP |
| | GVGVPGLGVPGVGVPGVGVPGLGVPGVGVPGLGVPGVGVPGVGVPGLGVPGVGVPGL |
| | GVPGVGVPGVGVPGLGVPGVGVPGLGVPGVGVPGVGVPGLGVPGVGVPGLGVPGVGV |
| | P |
| 35 | GRGDSPYSGRGDSPYSGRGDSPYSGRGDSPYSGRGDSPYSGRGDSPYSGRGDSPYSGRG |
| | DSPYSGRGDSPYSGRGDSPYSGRGDSPYSGRGDSPYSGRGDSPYSGRGDSPYSGRGDSP |
| | YSGRGDSPYSGRGDSPYSGRGDSPYSGRGDSPYSGRGDSPYSGRGDSPYSGRGDSPYSG |
| | RGDSPYSGRGDSPYSGRGDSPYSGRGDSPYSGRGDSPYSGRGDSPYSGRGDSPYSGRGD |
| | SPYSGRGDSPYSGRGDSPYSGRGDSPYSGRGDSPYSGRGDSPYSGRGDSPYSGRGDSPY |
| | SGRGDSPYSGRGDSPYSGRGDSPYS |
| 36 | GVGVPGLGVPGVGVPGLGVPGVGVPGVGVPGLGVPGVGVPGLGVPGVGVPGVGVPGL |
| | GVPGVGVPGLGVPGVGVPGVGVPGLGVPGVGVPGLGVPGVGVPGVGVPGLGVPGVGV |
| | PGLGVPGVGVPGVGVPGLGVPGVGVPGLGVPGVGVPGVGVPGLGVPGVGVPGLGVPG |
| | VGVPGVGVPGLGVPGVGVPGLGVPGVGVPGVGVPGLGVPGVGVPGLGVPGVGVPGVG |
| | VPGLGVPGVGVPGLGVPGVGVPGVGVPGLGVPGVGVPGLGVPGVGVPGVGVPGLGVP |
| | GVGVPGLGVPGVGVPGVGVPGLGVPGVGVPGLGVPGVGVPGVGVPGLGVPGVGVPGL |
| | GVPGVGVPGVGVPGLGVPGVGVPGLGVPGVGVPGVGVPGLGVPGVGVPGLGVPGVGV |
| | PY |
| 37 | GVGVPGVGVPGAGVPGVGVPGVGVPGVGVPGVGVPGAGVPGVGVPGVGVPGVGVPG |
| | VGVPGAGVPGVGVPGVGVPGVGVPGVGVPGAGVPGVGVPGVGVPGVGVPGVGVPGA |
| | GVPGVGVPGVGVPGVGVPGVGVPGAGVPGVGVPGVGVPGVGVPGVGVPGAGVPGVG |
| | VPGVGVPGVGVPGVGVPGAGVPGVGVPGVGVPGVGVPGVGVPGAGVPGVGVPGVGV |
| | PGVGVPGVGVPGAGVPGVGVPGVGVPGVGVPGVGVPGAGVPGVGVPGVGVPGVGVP |
| | GVGVPGAGVPGVGVPGVGVPGVGVPGVGVPGAGVPGVGVPGVGVPGVGVPGVGVPG |
| | AGVPGVGVPGVGVPGVGVPGVGVPGAGVPGVGVPGVGVPGVGVPGVGVPGAGVPGV |
| | GVPGVGVPY |
| 38 | GVGVPOLOVPGVGVPGLGVPGVGVPGVGVPGLGVPGVGVPGLGVPGVGVPGVGVPGL |
| | GVPGVGVPGLGVPGVGVPGVGVPGLGVPGVGVPOLGVPGVGVPGVGVPGLGVPGVGV |
| | POLGVPGVGVPGVGVPGLGVPGVGVPGLGVPGVGVPGVGVPGLGVPGVGVPGLGVPG |
| | VGVPGVGVPGLGVPGVGVPGLGVPGVGVPGVGVPGLGVPGVGVPGLOVPGVGVPGVG |
| | VPGLGVPGVGVPGLGVPGVGVPGVGVPGLGVPGVGVPGLGVPGVGVPGVGVPGLGVP |
| | GVGVPOLOVPGVGVPGVGVPGLGVPGVGVPGLGVPGVGVPGVGVPGLGVPGVGVPGL |
| | GVPGVGVPGVGVPGLGVPGVGVPGLGVPGVGVPGVGVPGLGVPGVGVPGLGVPGVGV |
| | P |
| 39 | GVGVPGVGVPGAGVPGVGVPGVGVPGVGVPGVGVPGAGVPGVGVPGVGVPGVGVPG |
| | VGVPGAGVPGVGVPGVGVPGVGVPGVGVPGAGVPGVGVPGVGVPGVGVPGVGVPGA |
| | GVPGVGVPGVGVPGVGVPGVGVPGAGVPGVGVPGVGVPGVGVPGVGVPGAGVPGVG |
| | VPGVGVPGVGVPGVGVPGAGVPGVGVPGVGVPGVGVPGVGVPGAGVPGVGVPGVGV |
| | PGVGVPGVGVPGAGVPGVGVPGVGVPGVGVPGVGVPGAGVPGVGVPGVGVPGVGVP |
| | GVGVPGAGVPGVGVPGVGVPGVGVPGVGVPGAGVPGVGVPGVGVPGVGVPGVGVPG |
| | AGVPGVGVPGVGVPGVGVPGVGVPGAGVPGVGVPGVGVPGVGVPGVGVPGAGVPGV |
| | GVPGVGVP |
| 40 | GVGPVGAGPVGVGPVGAGPVGVGPVGVGPVGAGPVGVGPVGAGPVGVGPVGVGPVG |
| | AGPVGVGPVGAGPVGVGPVGVGPVGAGPVGVGPVGAGPVGVGPVGVGPVGAGPVGV |
| | GPVGAGPVGVGPVGVGPVGAGPVGVGPVGAGPVGVGPVGVGPVGAGPVGVGPVGAG |
| | PVGVGPVGVGPVGAGPVGVGPVGAGPVGVGPVGVGPVGAGPVGVGPVGAGPVGVGP |
| | VGVGPVGAGPVGVGPVGAGPVGVGPVGVGPVGAGPVGVGPVGAGPVGVGPVGVGPV |
| | GAGPVGVGPVGAGPVGVGPVGVGPVGAGPVGVGPVGAGPVGVGPVGVGPVGAGPVG |
| | VGPVGAGPVGVGPV |
| 41 | GVGPVGAGPVGVGPVGAGPVGVGPVGVGPVGAGPVGVGPVGAGPVGVGPVGVGPVG |
| | AGPVGVGPVGAGPVGVGPVGVGPVGAGPVGVGPVGAGPVGVGPVGVGPVGAGPVGV |
| | GPVGAGPVGVGPVGVGPVGAGPVGVGPVGAGPVGVGPVGVGPVGAGPVGVGPVGAG |
| | PVGVGPVGVGPVGAGPVGVGPVGAGPVGVGPVGVGPVGAGPVGVGPVGAGPVGVGP |
| | VGVGPVGAGPVGVGPVGAGPVGVGPVGVGPVGAGPVGVGPVGAGPVGVGPVGVGPV |
| | GAGPVGVGPVGAGPVGVGPVGVGPVGAGPVGVGPVGAGPVGVGPVGVGPVGAGPVG |
| | VGPVGAGPVGVGPVGVGPVGAGPVGVGPVGAGPVGVGPVGVGPVGAGPVGVGPVGA |
| | GPVGVGPV |
| 42 | GVGVPGVGVPGAGVPGVGVPGVGVPGVGVPGVGVPGAGVPGVGVPGVGVPGVGVPG |
| | VGVPGAGVPGVGVPGVGVPGVGVPGVGVPGAGVPGVGVPGVGVPGVGVPGVGVPGA |
| | GVPGVGVPGVGVPGVGVPGVGVPGAGVPGVGVPGVGVPGVGVPGVGVPGAGVPGVG |
| | VPGVGVPGVGVPGVGVPGAGVPGVGVPGVGVPGVGVPGVGVPGAGVPGVGVPGVGV |
| | PGVGVPGVGVPGAGVPGVGVPGVGVPGVGVPGVGVPGAGVPGVGVPGVGVPGVGVP |
| | GVGVPGAGVPGVGVPGVGVPGVGVPGVGVPGAGVPGVGVPGVGVPGVGVPGVGVPG |
| | AGVPGVGVPGVGVPGVGVPGVGVPGAGVPGVGVPGVGVPGVGVPGVGVPGAGVPGV |
| | GVPGVGVP |
| 43 | GVGVPGLGVPGVGVPGLGVPGVGVPGVGVPGLGVPGVGVPGLGVPGVGVPGVGVPGL |
| | GVPGVGVPGLGVPGVGVPGVGVPGLGVPGVGVPGLGVPGVGVPGVGVPGLGVPGVGV |
| | PGLGVPGVGVPGVGVPGLGVPGVGVPGLGVPGVGVPGVGVPGLGVPGVGVPGLGVPG |
| | VGVPGVGVPGLGVPGVGVPGLGVPGVGVPGVGVPGLGVPGVGVPGLGVPGVGVPGVG |
| | VPGLGVPGVGVPGLGVPGVGVPGVGVPGLGVPGVGVPGLGVPGVGVPGVGVPGLGVP |
| | GVGVPGLGVPGVGVPGVGVPGLGVPGVGVPGLGVPGVGVPGVGVPGLGVPGVGVPGL |
| | GVPGVGVPGVGVPGLGVPGVGVPGLGVPGVGVPGVGVPGLGVPGVGVPGLGVPGVGV |
| | P |
| 44 | SKGPGVGVPGLGVPGVGVPGLGVPGVGVPGVGVPGLGVPGVGVPGLGVPGVGVPGVG |
| | VPGLGVPGVGVPGLGVPGVGVPGVGVPGLGVPGVGVPGLGVPGVGVPGVGVPGLGVP |
| | GVGVPGLGVPGVGVPGVGVPGLGVPGVGVPGLGVPGVGVPGVGVPGLGVPGVGVPGL |
| | GVPGVGVPGVGVPGLGVPGVGVPGLGVPGVGVPGVGVPGLGVPGVGVPGLGVPGVGV |
| | PGVGVPGLGVPGVGVPGLGVPGVGVPGVGVPGLGVPGVGVPGLGVPGVGVPGVGVPG |
| | LGVPGVGVPGLGVPGVGVPGVGVPGLGVPGVGVPGLGVPGVGVPGVGVPGLGVPGVG |
| | VPGLGVPGVGVPGVGVPGLGVPGVGVPGLGVPGVGVPGVGVPGLGVPGVGVPGLGVP |
| | GVGVP |
| 45 | SKGPGVGVPGVGVPGAGVPGVGVPGVGVPGVGVPGVGVPGAGVPGVGVPGVGVPGV |
| | GVPGVGVPGAGVPGVGVPGVGVPGVGVPGVGVPGAGVPGVGVPGVGVPGVGVPGVG |
| | VPGAGVPGVGVPGVGVPGVGVPGVGVPGAGVPGVGVPGVGVPGVGVPGVGVPGAGV |
| | PGVGVPGVGVPGVGVPGVGVPGAGVPGVGVPGVGVPGVGVPGVGVPGAGVPGVGVP |
| | GVGVPGVGVPGVGVPGAGVPGVGVPGVGVPGVGVPGVGVPGAGVPGVGVPGVGVPG |
| | VGVPGVGVPGAGVPGVGVPGVGVPGVGVPGVGVPGAGVPGVGVPGVGVPGVGVPGV |
| | GVPGAGVPGVGVPGVGVPGVGVPGVGVPGAGVPGVGVPGVGVPGVGVPGVGVPGAG |
| | VPGVGVPGVGVP |
| 46 | SKGPGVGPVGAGPVGVGPVGAGPVGVGPVGVGPVGAGPVGVGPVGAGPVGVGPVGV |
| | GPVGAGPVGVGPVGAGPVGVGPVGVGPVGAGPVGVGPVGAGPVGVGPVGVGPVGAG |
| | PVGVGPVGAGPVGVGPVGVGPVGAGPVGVGPVGAGPVGVGPVGVGPVGAGPVGVGP |
| | VGAGPVGVGPVGVGPVGAGPVGVGPVGAGPVGVGPVGVGPVGAGPVGVGPVGAGPV |
| | GVGPVGVGPVGAGPVGVGPVGAGPVGVGPVGVGPVGAGPVGVGPVGAGPVGVGPVG |
| | VGPVGAGPVGVGPVGAGPVGVGPVGVGPVGAGPVGVGPVGAGPVGVGPVGVGPVGA |
| | GPVGVGPVGAGPVGVGPV |
| 47 | GVGVPGLGVPGVGVPGLGVPGVGVPGVGVPGLGVPGVGVPGLGVPGVGVPGVGVPGL |
| | GVPGVGVPGLGVPGVGVPGVGVPGLGVPGVGVPGLGVPGVGVPGVGVPGLGVPGVGV |
| | PGLGVPGVGVPGVGVPGLGVPGVGVPGLGVPGVGVPGVGVPGLGVPGVGVPGLGVPG |
| | VGVPGVGVPGLGVPGVGVPGLGVPGVGVPGVGVPGLGVPGVGVPGLGVPGVGVPGVG |
| | VPGLGVPGVGVPGLGVPGVGVPGVGVPGLGVPGVGVPGLGVPGVGVPGVGVPGLGVP |
| | GVGVPGLGVPGVGVPGVGVPGLGVPGVGVPGLGVPGVGVPGVGVPGLGVPGVGVPGL |
| | GVPGVGVPGVGVPGLGVPGVGVPGLGVPGVGVPGVGVPGLGVPGVGVPGLGVPGVGV |
| | P |
| 48 | GVGVPGVGVPGAGVPGVGVPGVGVPGVGVPGVGVPGAGVPGVGVPGVGVPGVGVPG |
| | VGVPGAGVPGVGVPGVGVPGVGVPGVGVPGAGVPGVGVPGVGVPGVGVPGVGVPGA |
| | GVPGVGVPGVGVPGVGVPGVGVPGAGVPGVGVPGVGVPGVGVPGVGVPGAGVPGVG |
| | VPGVGVPGVGVPGVGVPGAGVPGVGVPGVGVPGVGVPGVGVPGAGVPGVGVPGVGV |
| | PGVGVPGVGVPGAGVPGVGVPGVGVPGVGVPGVGVPGAGVPGVGVPGVGVPGVGVP |
| | GVGVPGAGVPGVGVPGVGVPGVGVPGVGVPGAGVPGVGVPGVGVPGVGVPGVGVPG |
| | AGVPGVGVPGVGVPGVGVPGVGVPGAGVPGVGVPGVGVPGVGVPGVGVPGAGVPGV |
| | GVPGVGVP |
| 49 | GVGPVGAGPVGVGPVGAGPVGVGPVGVGPVGAGPVGVGPVGAGPVGVGPVGVGPVG |
| | AGPVGVGPVGAGPVGVGPVGVGPVGAGPVGVGPVGAGPVGVGPVGVGPVGAGPVGV |
| | GPVGAGPVGVGPVGVGPVGAGPVGVGPVGAGPVGVGPVGVGPVGAGPVGVGPVGAG |
| | PVGVGPVGVGPVGAGPVGVGPVGAGPVGVGPVGVGPVGAGPVGVGPVGAGPVGVGP |
| | VGVGPVGAGPVGVGPVGAGPVGVGPVGVGPVGAGPVGVGPVGAGPVGVGPVGVGPV |
| | GAGPVGVGPVGAGPVGVGPVGVGPVGAGPVGVGPVGAGPVGVGPVGVGPVGAGPVG |
| | VGPVGAGPVGVGPV |
| 50 | MSKGPGVGVPGLGVPGVGVPGLGVPGVGVPGVGVPGLGVPGVGVPGLGVPGVGVPGV |
| | GVPGLGVPGVGVPGLGVPGVGVPGVGVPGLGVPGVGVPGLGVPGVGVPGVGVPGLGV |
| | PGVGVPGLGVPGVGVPGVGVPGLGVPGVGVPGLGVPGVGVPGVGVPGLGVPGVGVPG |
| | LGVPGVGVPGVGVPGLGVPGVGVPGLGVPGVGVPGVGVPGLGVPGVGVPGLGVPGVG |
| | VPGVGVPGLGVPGVGVPGLGVPGVGVPGVGVPGLGVPGVGVPGLGVPGVGVPGVGVP |
| | GLGVPGVGVPGLGVPGVGVPGVGVPGLGVPGVGVPGLGVPGVGVPGVGVPGLGVPGV |
| | GVPGLGVPGVGVPGVGVPGLGVPGVGVPGLGVPGVGVPGVGVPGLGVPGVGVPGLGV |
| | PGVGVP |
| 51 | MSKGPGVGVPGVGVPGAGVPGVGVPGVGVPGVGVPGVGVPGAGVPGVGVPGVGVPG |
| | VGVPGVGVPGAGVPGVGVPGVGVPGVGVPGVGVPGAGVPGVGVPGVGVPGVGVPGV |
| | GVPGAGVPGVGVPGVGVPGVGVPGVGVPGAGVPGVGVPGVGVPGVGVPGVGVPGAG |
| | VPGVGVPGVGVPGVGVPGVGVPGAGVPGVGVPGVGVPGVGVPGVGVPGAGVPGVGV |
| | PGVGVPGVGVPGVGVPGAGVPGVGVPGVGVPGVGVPGVGVPGAGVPGVGVPGVGVP |
| | GVGVPGVGVPGAGVPGVGVPGVGVPGVGVPGVGVPGAGVPGVGVPGVGVPGVGVPG |
| | VGVPGAGVPGVGVPGVGVPGVGVPGVGVPGAGVPGVGVPGVGVPGVGVPGVGVPGA |
| | GVPGVGVPGVGVP |
| 52 | MSKGPGVGPVGAGPVGVGPVGAGPVGVGPVGVGPVGAGPVGVGPVGAGPVGVGPVG |
| | VGPVGAGPVGVGPVGAGPVGVGPVGVGPVGAGPVGVGPVGAGPVGVGPVGVGPVGA |
| | GPVGVGPVGAGPVGVGPVGVGPVGAGPVGVGPVGAGPVGVGPVGVGPVGAGPVGVG |
| | PVGAGPVGVGPVGVGPVGAGPVGVGPVGAGPVGVGPVGVGPVGAGPVGVGPVGAGP |
| | VGVGPVGVGPVGAGPVGVGPVGAGPVGVGPVGVGPVGAGPVGVGPVGAGPVGVGPV |
| | GVGPVGAGPVGVGPVGAGPVGVGPVGVGPVGAGPVGVGPVGAGPVGVGPVGVGPVG |
| | AGPVGVGPVGAGPVGVGPV |
| 53 | GVGVPGVGVPGAGVPGVGVPGVGVPGVGVPGVGVPGAGVPGVGVPGVGVPGVGVPG |
| | VGVPGAGVPGVGVPGVGVPGVGVPGVGVPGAGVPGVGVPGVGVPGVGVPGVGVPGA |
| | GVPGVGVPGVGVPGVGVPGVGVPGAGVPGVGVPGVGVPGVGVPGVGVPGAGVPGVG |
| | VPGVGVPGVGVPGVGVPGAGVPGVGVPGVGVPY |
| 54 | GVGVPGVGVPGAGVPGVGVPGVGVPGVGVPGVGVPGAGVPGVGVPGVGVPGVGVPG |
| | VGVPGAGVPGVGVPGVGVPGVGVPGVGVPGAGVPGVGVPGVGVPGVGVPGVGVPGA |
| | GVPGVGVPGVGVPGVGVPGVGVPGAGVPGVGVPGVGVPGVGVPGVGVPGAGVPGVG |
| | VPGVGVPGVGVPGVGVPGAGVPGVGVPGVGVP |
| 55 | GVGPVGAGPVGVGPVGAGPVGVGPVGVGPVGAGPVGVGPVGAGPVGVGPVGVGPVG |
| | AGPVGVGPVGAGPVGVGPVGVGPVGAGPVGVGPVGAGPVGVGPVGVGPVGAGPVGV |
| | GPVGAGPVGVGPVGVGPVGAGPVGVGPVGAGPVGVGPVGVGPVGAGPVGVGPVGAG |
| | PVGVGPVGVGPVGAGPVGVGPVGAGPVGVGPVGVGPVGAGPVGVGPVGAGPVGVGP |
| | VGVGPVGAGPVGVGPVGAGPVGVGPVGVGPVGAGPVGVGPVGAGPVGVGPVGVGPV |
| | GAGPVGVGPVGAGPVGVGPVGVGPVGAGPVGVGPVGAGPVGVGPVGVGPVGAGPVG |
| | VGPVGAGPVGVGPV |
| 56 | MSKGPGVGVPGVGVPGVGVPGVGVPGVGVPGVGVPGVGVPGVGVPGVGVPGVGVPG |
| | VGVPGVGVPGVGVPGVGVPGVGVPGVGVPGVGVPGVGVPGVGVPGVGVPGVGVPGV |
| | GVPGVGVPGVGVPGVGVPGVGVPGVGVPGVGVPGVGVPGVGVPGVGVPGVGVPGVG |
| | VPGVGVPGVGVPGVGVPGVGVPGVGVPGVGVPGVGVPGVGVPGVGVPGVGVPGVGV |
| | PGVGVPGVGVPGVGVPGVGVPGVGVPGVGVPGVGVPGVGVPGVGVPGVGVPGVGVP |
| | GVGVPGVGVPGVGVPGVGVPGVGVPGVGVPGVGVPGVGVPGVGVPGVGVPGVGVPG |
| | VGVPGVGVPGVGVPGVGVPGVGVPGVGVPGVGVPGVGVPGVGVPGVGVPGVGVPGV |
| | GVPGVGVPGVGVP |
| 57 | GVGVPGVGVPGVGVPGVGVPGVGVPGVGVPGVGVPGVGVPGVGVPGVGVPGVGVPG |
| | VGVPGVGVPGVGVPGVGVPGVGVPGVGVPGVGVPGVGVPGVGVPGVGVPGVGVPGV |
| | GVPGVGVPGVGVPGVGVPGVGVPGVGVPGVGVPGVGVPGVGVPGVGVPGVGVPGVG |
| | VPGVGVPGVGVPGVGVPGVGVPGVGVPGVGVPGVGVPGVGVPGVGVPGVGVPGVGV |
| | PGVGVPGVGVPGVGVPGVGVPGVGVPGVGVPGVGVPGVGVPGVGVPGVGVPGVGVP |
| | GVGVPGVGVPGVGVPGVGVPGVGVPGVGVPGVGVPGVGVPGVGVPGVGVPGVGVPG |
| | VGVPGVGVPGVGVPGVGVPGVGVPGVGVPGVGVPGVGVPGVGVPGVGVPGVGVPGV |
| | GVPGVGVP |
| 58 | MSKGPGVGVPGLGVPGVGVPGLGVPGVGVPGVGVPGLGVPGVGVPGLGVPGVGVPGV |
| | GVPGLGVPGVGVPGLGVPGVGVPGVGVPGLGVPGVGVPGLGVPGVGVPGVGVPGLGV |
| | PGVGVPGLGVPGVGVPGVGVPGLGVPGVGVPGLGVPGVGVPGVGVPGLGVPGVGVPG |
| | LGVPGVGVPGVGVPGLGVPGVGVPGLGVPGVGVPGVGVPGLGVPGVGVPGLGVPGVG |
| | VPGVGVPGLGVPGVGVPGLGVPGVGVPGVGVPGLGVPGVGVPGLGVPGVGVPGVGVP |
| | GLGVPGVGVPGLGVPGVGVPGVGVPGLGVPGVGVPGLGVPGVGVPGVGVPGLGVPGV |
| | GVPGLGVPGVGVPGVGVPGLGVPGVGVPGLGVPGVGVPGVGVPGLGVPGVGVPGLGV |
| | PGVGVPG |
| 59 | PGVGVPGLGVPGVGVPGLGVPGVGVPGVGVPGLGVPGVGVPGLGVPGVGVPGVGVPG |
| | LGVPGVGVPGLGVPGVGVPGVGVPGLGVPGVGVPGLGVPGVGVPGVGVPGLGVPGVG |
| | VPGLGVPGVGVPGVGVPGLGVPGVGVPGLGVPGVGVPGVGVPGLGVPGVGVPGLGVP |
| | GVGVPGVGVPGLGVPGVGVPGLGVPGVGVPGVGVPGLGVPGVGVPGLGVPGVGVPGV |
| | GVPGLGVPGVGVPGLGVPGVGVPGVGVPGLGVPGVGVPGLGVPGVGVPGVGVPGLGV |
| | PGVGVPGLGVPGVGVPGVGVPGLGVPGVGVPGLGVPGVGVPGVGVPGLGVPGVGVPG |
| | LGVPGVGVPGVGVPGLGVPGVGVPGLGVPGVGVPGVGVPGLGVPGVGVPGLGVPGVG |
| | VPG |
| 60 | GVGVPGLGVPGVGVPGLGVPGVGVPGVGVPGLGVPGVGVPGLGVPGVGVPGVGVPGL |
| | GVPGVGVPGLGVPGVGVPGVGVPGLGVPGVGVPGLGVPGVGVPGVGVPGLGVPGVGV |
| | PGLGVPGVGVPGVGVPGLGVPGVGVPGLGVPGVGVPGVGVPGLGVPGVGVPGLGVPG |
| | VGVPGVGVPGLGVPGVGVPGLGVPGVGVPGVGVPGLGVPGVGVPGLGVPGVGVPGVG |
| | VPGLGVPGVGVPGLGVPGVGVPGVGVPGLGVPGVGVPGLGVPGVGVPGVGVPGLGVP |
| | GVGVPGLGVPGVGVPGVGVPGLGVPGVGVPGLGVPGVGVPGVGVPGLGVPGVGVPGL |
| | GVPGVGVPGVGVPGLGVPGVGVPGLGVPGVGVPGVGVPGLGVPGVGVPGLGVPGVGV |
| | P |
| 217 | (Val-Pro-Gly-Xaa-Gly)n, wherein n is an integer in the range of 1-500, inclusive of |
| | endpoints |
| 262 | MGVGVPGVGVPGAGVPGVGVPGVGVPGVGVPGVGVPGAGVPGVGVPGVGVPGVGVP |
| | GVGVPGAGVPGVGVPGVGVPGVGVPGVGVPGAGVPGVGVPGVGVPGVGVPGVGVPG |
| | AGVPGVGVPGVGVPGVGVPGVGVPGAGVPGVGVPGVGVPGVGVPGVGVPGAGVPGV |
| | GVPGVGVPGVGVPGVGVPGAGVPGVGVPGVGVPGVGVPGVGVPGAGVPGVGVPGVG |
| | VPGVGVPGVGVPGAGVPGVGVPGVGVPGVGVPGVGVPGAGVPGVGVPGVGVPGVGV |
| | PGVGVPGAGVPGVGVPGVGVPGVGVPGVGVPGAGVPGVGVPGVGVPGVGVPGVGVP |
| | GAGVPGVGVPGVGVPGVGVPGVGVPGAGVPGVGVPGVGVPGVGVPGVGVPGAGVPG |
| | VGVPGVGVPGY |
| 263 | MGAGVPGVGVPGAGVPGVGVPGAGVPGVGVPGAGVPGVGVPGAGVPGVGVPGAGVP |
| | GVGVPGAGVPGVGVPGAGVPGVGVPGAGVPGVGVPGAGVPGVGVPGAGVPGVGVPG |
| | AGVPGVGVPGAGVPGVGVPGAGVPGVGVPGAGVPGVGVPGAGVPGVGVPGAGVPGV |
| | GVPGAGVPGVGVPGAGVPGVGVPGAGVPGVGVPGAGVPGVGVPGGAGVPGVGVPGA |
| | GVPGVGVPGAGVPGVGVPGAGVPGVGVPGAGVPGVGVPGAGVPGVGVPGAGVPGVG |
| | VPGAGVPGVGVPGAGVPGVGVPGAGVPGVGVPGAGVPGVGVPGAGVPGVGVPGAGV |
| | PGVGVPGAGVPGVGVPGAGVPGVGVPGAGVPGVGVPGAGVPGVGVPGAGVPGVGVP |
| | GAGVPGVGVPGWP |
| 264 | MSKGPGGVGVPGLGVPGVGVPGLGVPGVGVPGVGVPGLGVPGVGVPGLGVPGVGVPG |
| | VGVPGLGVPGVGVPGLGVPGVGVPGVGVPGLGVPGVGVPGLGVPGVGVPGVGVPGLG |
| | VPGVGVPGLGVPGVGVPGVGVPGLGVPGVGVPGLGVPGVGVPGVGVPGLGVPGVGVP |
| | GLGVPGVGVPGVGVPGLGVPGVGVPGLGVPGVGVPGVGVPGLGVPGVGVPGLGVPGV |
| | GVPGVGVPGLGVPGVGVPGLGVPGVGVPGVGVPGLGVPGVGVPGLGVPGVGVPGVGV |
| | PGLGVPGVGVPGLGVPGVGVPGVGVPGLGVPGVGVPGLGVPGVGVPGVGVPGLGVPG |
| | VGVPGLGVPGVGVPGVGVPGLGVPGVGVPGLGVPGVGVPGVGVPGLGVPGVGVPGLG |
| | VPGVGVPG |

[0157] In embodiments, the fusion protein comprises from 1 to 500, from 1 to 450, from 1 to 400, from 1 to 350, from 1 to 300, from 1 to 250, from 1 to 200 from 1 to 150, from 1 to 100, from 1 to 95, from 1 to 90, from 1 to 85, from 1 to 80, from 1 to 75, from 1 to 70, from 1 to 65, from 1 to 60, from 1 to 55, from 1 to 50, from 1 to 45, from 1 to 40, from 1 to 35, from 1 to 30, from 1 to 25, from 1 to 20, from 1 to 15, from 1 to 10, from 1 to 9, from 1 to 8, from 1 to 7, from 1 to 6, from 1 to 5, from 1 to 4, from 1 to 3, from 1 to 2, from 2 to 10, from 2 to 9, from 2 to 8, from 2 to 7, from 2 to 6, from 2 to 5, from 2 to 4, from 2 to 3, from 3 to 10, from 4 to 10, from 5 to 10, from 6 to 10, from 7 to 10, or from 8 to 10 different polypeptides with phase behavior. In embodiments, the fusion protein comprises at least one, at least two, at least three, at least four, at least five, at least six, at least seven, at least eight, at least nine, or at least ten different polypeptides with phase behavior. For example, the fusion protein may comprise a first polypeptide with phase behavior and a second polypeptide with phase behavior. In embodiments, the fusion protein comprises a third, fourth, fifth, sixth, seventh, eighth, ninth, or tenth polypeptide with phase behavior.

[0158] In embodiments, the fusion protein comprising an amino acid sequence selected from any one of SEQ ID NOs: 1-60 and 217 also comprises up to 10, up to 15, up to 20, or up to 25 additional N-terminal and/or C-terminal amino acids. In embodiments, the fusion protein comprising an amino acid sequence of any one of SEQ ID NOs: 1-60 and 217 also comprises an additional N-terminal methionine. In embodiments, the fusion protein comprising an amino acid sequence of any one of SEQ ID NOs: 1-60 and 217 also comprises an additional C-terminal glycine. In embodiments, the fusion protein comprising an amino acid sequence selected from any one of SEQ ID NOs: 56, and 262-264 also comprises up to 10, up to 15, up to 20, or up to 25 additional N-terminal and/or C-terminal amino acids. In embodiments, the fusion protein comprising an amino acid sequence of any one of SEQ ID NOs: 56, and 262-264 also comprises an additional N-terminal methionine. In embodiments, the fusion protein comprising an amino acid sequence of any one of SEQ ID NOs: 56, and 262-264 also comprises an additional C-terminal glycine. In embodiments, the fusion protein comprising an amino acid sequence selected of SEQ ID NOs: 56 also comprises up to 10, up to 15, up to 20, or up to 25 additional N-terminal and/or C-terminal amino acids. In embodiments, the fusion protein comprising an amino acid sequence of SEQ ID NOs: 56 also comprises an additional N-terminal methionine. In embodiments, the fusion protein comprising an amino acid sequence of SEQ ID NOs: 56 also comprises an additional C-terminal glycine.

[0159] In embodiments, a fusion protein contains polypeptide repeat units. In embodiments, there are from 5-500 polypeptide repeat units, including all ranges and values therebetween. In embodiments, there are 5, 6, 7, 8, 9, 10, 11, 12, 13, 14, 15, 16, 17, 18, 19, 20, 21, 22, 23, 24, 25, 26, 27, 28, 29, 30, 31, 32, 33, 34, 35, 36, 37, 38, 39, 40, 41, 42, 43, 44, 45, 46, 47, 48, 49, 50, 51, 52, 53, 54, 55, 56, 57, 58, 59, 60, 61, 62, 63, 64, 65, 66, 67, 68, 69, 70, 71, 72, 73, 74, 75, 76, 77, 78, 79, 80, 81, 82, 83, 84, 85, 86, 87, 88, 89, 90, 91, 92, 93, 94, 95, 96, 97, 98, 99, 100, 101, 102, 103, 104, 105, 106, 107, 108, 109, 110, 111, 112, 113, 114, 115, 116, 117, 118, 119, 120, 121, 122, 123, 124, 125, 126, 127, 128, 129, 130, 131, 132, 133, 134, 135, 136, 137, 138, 139, 140, 141, 142, 143, 144, 145, 146, 147, 148, 149, 150, 151, 152, 153, 154, 155, 156, 157, 158, 159, 160, 161, 162, 163, 164, 165, 166, 167, 168, 169, 170, 171, 172, 173, 174, 175, 176, 177, 178, 179, 180, 181, 182, 183, 184, 185, 186, 187, 188, 189, 190, 191, 192, 193, 194, 195, 196, 197, 198, 199, 200, 201, 202, 203, 204, 205, 206, 207, 208, 209, 210, 211, 212, 213, 214, 215, 216, 217, 218, 219, 220, 221, 222, 223, 224, 225, 226, 227, 228, 229, 230, 231, 232, 233, 234, 235, 236, 237, 238, 239, 240, 241, 242, 243, 244, 245, 246, 247, 248, 249, 250, 251, 252, 253, 254, 255, 256, 257, 258, 259, 260, 261, 262, 263, 264, 265, 266, 267, 268, 269, 270, 271, 272, 273, 274, 275, 276, 277, 278, 279, 280, 281, 282, 283, 284, 285, 286, 287, 288, 289, 290, 291, 292, 293, 294, 295, 296, 297, 298, 299, 300, 301, 302, 303, 304, 305, 306, 307, 308, 309, 310, 311, 312, 313, 314, 315, 316, 317, 318, 319, 320, 321, 322, 323, 324, 325, 326, 327, 328, 329, 330, 331, 332, 333, 334, 335, 336, 337, 338, 339, 340, 341, 342, 343, 344, 345, 346, 347, 348, 349, 350, 351, 352, 353, 354, 355, 356, 357, 358, 359, 360, 361, 362, 363, 364, 365, 366, 367, 368, 369, 370, 371, 372, 373, 374, 375, 376, 377, 378, 379, 380, 381, 382, 383, 384, 385, 386, 387, 388, 389, 390, 391, 392, 393, 394, 395, 396, 397, 398, 399, 400, 401, 402, 403, 404, 405, 406, 407, 408, 409, 410, 411, 412, 413, 414, 415, 416, 417, 418, 419, 420, 421, 422, 423, 424, 425, 426, 427, 428, 429, 430, 431, 432, 433, 434, 435, 436, 437, 438, 439, 440, 441, 442, 443, 444, 445, 446, 447, 448, 449, 450, 451, 452, 453, 454, 455, 456, 457, 458, 459, 460, 461, 462, 463, 464, 465, 466, 467, 468, 469, 470, 471, 472, 473, 474, 475, 476, 477, 478, 479, 480, 481, 482, 483, 484, 485, 486, 487, 488, 489, 490, 491, 492, 493, 494, 495, 496, 497, 498, 499, or 500 polypeptide repeat units.

[0160] In embodiments, the fusion protein has the same amino acid composition of an ELP and/or RLP but does not contain repeats. In embodiments, the fusion protein comprises an amino acid sequence that is about 80%, about 81%, about 82%, about 83%, about 84%, about 85%, about 86%, about 87%, about 88%, about 89%, about 90%, about 91%, about 92%, about 93%, about 94%, about 95%, about 96%, about 97%, about 98%, about 99%, or about 100% identical to an ELP and/or RLP. In embodiments, the fusion protein comprises an amino acid composition that is 80%, about 81%, about 82%, about 83%, about 84%, about 85%, about 86%, about 87%, about 88%, about 89%, about 90%, about 91%, about 92%, about 93%, about 94%, about 95%, about 96%, about 97%, about 98%, about 99%, or about 100% identical to an ELP and/or RLP. In embodiments, the fusion protein comprises a composition of hydrophobic amino acids that is about 80%, about 81%, about 82%, about 83%, about 84%, about 85%, about 86%, about 87%, about 88%, about 89%, about 90%, about 91%, about 92%, about 93%, about 94%, about 95%, about 96%, about 97%, about 98%, about 99%, or about 100% identical to an ELP and/or RLP.

[0161] In embodiments, polypeptide with phase behavior has at least 80%, at least 81%, at least 82%, at least 83%, at least 84%, at least 85%, at least 86%, at least 87%, at least 88%, at least 89%, at least 90%, at least 91%, at least 92%, at least 93%, at least 94%, at least 95%, at least 96%, at least 97%, at least 98%, at least 99%, or 100% identity to a polypeptide of any one of SEQ ID NOs: 1-60, 217, or 262-264. In embodiments, polypeptide with phase behavior has at least 80%, at least 81%, at least 82%, at least 83%, at least 84%, at least 85%, at least 86%, at least 87%, at least 88%, at least 89%, at least 90%, at least 91%, at least 92%, at least 93%, at least 94%, at least 95%, at least 96%, at least 97%, at least 98%, at least 99%, or 100% identity to a polypeptide of any one of SEQ ID NOs: 56, and 262-264. In embodiments, the polypeptide with phase behavior has at least 80%, at least 81%, at least 82%, at least 83%, at least 84%, at least 85%, at least 86%, at least 87%, at least 88%, at least 89%, at least 90%, at least 91%, at least 92%, at least 93%, at least 94%, at least 95%, at least 96%, at least 97%, at least 98%, at least 99%, or 100% identity to a polypeptide of SEQ ID NO: 56.

[0162] In embodiments, the polypeptide with phase behavior comprises a non-repetitive unstructured polypeptide. In embodiments, the non-repetitive unstructured polypeptide has an amino acid sequence that contains at least 50 amino acids. In embodiments, the non-repetitive unstructured polypeptide has an amino acid sequence that contains at least 50, at least 60, at least 70, at least 80, at least 90, or at least 100 amino acids. In embodiments, the polypeptide with phase behavior comprises a P and G motif, comprising a plurality of P residues and a plurality of G residues. In embodiments, the P and G motif comprises at least about 10% proline and at least about 20% glycine. In embodiments, the sequence of the non-repetitive unstructured polypeptide is at least about 10% proline (e.g. at least 10%, 20%, 30%, 40%, 50%, 60%, 70%, or 80%) and at least 20% glycine (e.g. at least 20%, at least 30%, at least 40%, at least 50%, at least 60%, at least 70%, at least 80%, or at least 90%). In embodiments, the non-repetitive unstructured polypeptide has a sequence that contains at least about 40% of amino acids selected from the group consisting of valine, alanine, leucine, lysine, threonine, isoleucine, tyrosine, serine, and phenylalanine.

[0163] In embodiments, the non-repeated unstructured polypeptide comprises a sequence that does not contain three contiguous identical amino acids, wherein any 5-10 amino acid subsequence does not occur more than once in the non-repeated unstructured polypeptide, and wherein when the non-repeated unstructured polypeptide comprises a subsequence starting and ending with proline, and wherein the subsequence further comprises at least one glycine.

[0164] In embodiments, the ELPs and/or RLPs described herein are expressed as a component of a polypeptide with phase behavior. In embodiments, the polypeptide with phase behavior is expressed in bacteria or mammalian cells. In embodiments, the polypeptide with phase behavior is expressed in Escherichia coli. In embodiments, the polypeptide with phase behavior is expressed in insect cells (e.g., Sf9 cells). In embodiments, the sequence of the non-repetitive unstructured polypeptide is at least about 10% proline (e.g. at least 10%, 20%, 30%, 40%) and at least 20% glycine (e.g. at least 20%, 30%, 40%, or 50%), and at least 40% (e.g. at least 40%, 50%, 60%, or 70%) of amino acids selected from the group consisting of valine, alanine, leucine, lysine, threonine, isoleucine, tyrosine, serine, and phenylalanine.

[0165] In embodiments, the ELPs and/or RLPs described herein are expressed as a component of a fusion protein. In embodiments, the fusion protein is expressed in bacteria or mammalian cells. In embodiments, the fusion protein is expressed in Escherichia coli. In embodiments, the fusion protein is expressed in insect cells (e.g., Sf9 cells).

[0166] In embodiments, the non-repetitive unstructured polypeptide does not contain three contiguous identical amino acids. In embodiments, the non-repetitive unstructured polypeptide comprises a subsequence (e.g. a fragment of the non-repetitive unstructured polypeptide) which only occurs once in the non-repetitive unstructured polypeptide sequence. In embodiments, the non-repetitive unstructured polypeptide comprises a subsequence that starts and ends with proline. In embodiments, the non-repetitive unstructured polypeptide comprises a subsequence that contains at least one glycine.

[0167] In embodiments, the polypeptide with phase behavior comprises a signal peptide. In embodiments, a signal peptides comprises an amino acid sequence selected from any one or SEQ ID NOS: 218-220. In embodiments, a signal peptides comprises an amino acid sequence that is about 80%, about 81%, about 82%, about 83%, about 84%, about 85%, about 86%, about 87%, about 88%, about 89%, about 90%, about 91%, about 92%, about 93%, about 94%, about 95%, about 96%, about 97%, about 98%, about 99%, or up to about 100% identical to any one of SEQ ID NOS: 218-220. In embodiments, the signal peptide is a polypeptide from Table 3.

TABLE 3
Exemplary amino acid sequences of signal
peptides

| SEQ ID NO | SEQUENCE |
|---|---|
| 218 | SKGP |
| 219 | MSKP |
| 220 | TCSQDEFRCHDGKCISRQFVCDSDRDCLDGSDEASCPGY |

[0168] In embodiments, the polypeptide with phase behavior comprises an amino acid sequence of (GVGVPGLGVPGVGVPGLGVPGVGVP)m (SEQ ID NO: 33), wherein m is 16. In embodiments, the polypeptide with phase behavior comprises an amino acid sequence of SEQ ID NO: 34. In embodiments, the fusion protein comprises an amino acid sequence of SEQ ID NO: 38. In embodiments, the fusion protein comprises an amino acid sequence of SEQ ID NO: 43. In embodiments, the fusion protein comprises an amino acid sequence of SEQ ID NO: 47. In embodiments, the fusion protein comprises an amino acid sequence of SEQ ID NO: 60.

Linkers Between Polypeptides with Phase Behavior and NBPs

[0169] In embodiments, the fusion protein comprises a linker. In embodiments, the NBP is coupled to the polypeptide with phase behavior via a linker. In embodiments, any linker that does not interfere with the function of the fusion protein may be utilized. In embodiments, a fusion comprises, from C-terminus to N-terminus one or more NBP, one or more linkers, and one or more polypeptides with phase behavior. In embodiments, a fusion comprises, from N-terminus to C-terminus one or more NBP, one or more linkers, and one or more polypeptides with phase behavior.

[0170] In embodiments, the linker connects the NBP to the polypeptide with phase behavior. In embodiments, the linker enables cooperative interactions between the polypeptide with phase behavior and the NBP. In embodiments, the linker is a peptide. In embodiments, the linker preserves the phase behavior of the polypeptide with phase behavior. In embodiments, the linker preserves the Tₜ of the polypeptide with phase behavior. In embodiments, the linker preserves the structure of the NBP. In embodiments, the linker comprises between 1 and 50 amino acids. In embodiments, the linker comprises 1, 2, 3, 4, 5, 6, 7, 8, 9, 10, 11, 12, 13, 14, 15, 16, 17, 18, 19, 20, 21, 22, 23, 24, 25, 26, 27, 28, 29, 30, 31, 32, 33, 34, 35, 36, 37, 38, 39, 40, 41, 42, 43, 44, 45, 46, 47, 48, 49, or 50 amino acids.

[0171] In embodiments, the stiffness of the linker is increased by the inclusion of proline in the linker amino acid sequence.

[0172] In embodiments, the flexibility of a linker is increased by the inclusion of small polar amino acids, including threonine, serine, and glycine.

[0173] In embodiments, the linker may adopt various secondary structures, including but not limited to α-helices, β-strands, and random coils. In embodiments, the linker adopts an α-helix and comprises an amino acid repeat of (EAAAK)ₙ (SEQ ID NO: 143) where n is a repeat number, i.e., an integer in the range of 1 to 20, inclusive of endpoints.

[0174] In embodiments, the linker is comprised of (G₄S)ₙ(SEQ ID NO: 144) where n can be an integer from 1 to 30 (e.g., 1, 2, 3, 4, 5, 6, 7, 8, 9, 10, 11, 12, 13, 14, 15, 16, 17, 18, 19, 20, 21, 22, 23, 24, 25, 26, 27, 28, 29, or 30). In embodiments, the polypeptide linker has a repeat of (SGGG)n (SEQ ID NO: 145), wherein n is an integer from 1 to 50 (e.g. 1, 2, 3, 4, 5, 6, 7, 8, 9, 10, 11, 12, 13, 14, 15, 16, 17, 18, 19, 20). In embodiments, the polypeptide linker has a repeat of (GGGS)n (SEQ ID NO: 146), wherein n is an integer from 1 to 20 (e.g. 1, 2, 3, 4, 5, 6, 7, 8, 9, 10, 11, 12, 13, 14, 15, 16, 17, 18, 19, or 20).

[0175] In embodiments, the linker has an amino acid sequence of KESGSVSSEQLAQFRSLD (SEQ ID NO: 147). In embodiments, the linker has an amino acid sequence of EGKSSGSGSESKST (SEQ ID NO: 148). In embodiments, the linker only contains glycine.

[0176] In embodiments, the peptide linker comprises a protease cleavage site. In embodiments, the protease cleavage site is a furin cleavage site.

[0177] In embodiments, the polypeptide linker is a poly-(Gly)ₙ linker, wherein n is an integer from 1 to 30 (e.g., 1, 2, 3, 4, 5, 6, 7, 8, 9, 10, 15, 16, 17, 18, 19, 20, 21, 22, 23, 24, 25, 26, 27, 28, 29, or 30 (SEQ ID NO: 149). In other embodiments, the linker is selected from the group consisting of: dipeptides, tripeptides, and quadripeptides. In embodiments, the linker is a dipeptide selected from the group consisting of alanine-serine (AS), leucine-glutamic acid (LE), and serine-arginine (SR).

[0178] In embodiments, the linker is selected from GKSSGSGSESKS (SEQ ID NO: 150), GSTSGSGKSSEGKG (SEQ ID NO: 151), GSTSGSGKSSEGSGSTKG (SEQ ID NO: 152), GSTSGSGKPGSGEGSTKG (SEQ ID NO: 153), EGKSSGSGSESKEF (SEQ ID NO: 154), SRSSG (SEQ ID NO: 155), and SGSSC (SEQ ID NO: 156).

[0179] In embodiments, the linker is a self-cleaving peptide. In embodiments, the self-cleaving peptide is a 2A peptide. 2A peptides are a class of 18-22 amino acid long peptides that induce ribosomal skipping during translation of a protein in a cell. In embodiments, the 2A peptide is a T2A peptide having an amino acid sequence of EGRGSLLTCGDVEENPGP (SEQ ID NO: 157), a P2A peptide having an amino acid sequence of ATNFSLLKQAGDVEENPGP (SEQ ID NO: 158), an E2A peptide having an amino acid sequence of QCTNYALLKLAGDVESNPGP (SEQ ID NO: 159), or an F2A peptide having an amino acid sequence of VKQTLNFDLLKLAGDVESNPGP (SEQ ID NO: 160). In embodiments, the 2A peptide has at least 80%, at least 85%, at least 90%, at least 95%, or at least 98% identity to any one of SEQ ID NOs. 157-160. In embodiments, a 2A peptide further comprises GSG on its N-terminus (SEQ ID NOs: 161-164).

[0180] In embodiments, the linker comprises an amino acid sequence of any one of SEQ ID NOs: 143-216. In embodiments, the linker has at least 80%, at least 81%, at least 82%, at least 83%, at least 84%, at least 85%, at least 86%, at least 87%, at least 88%, at least 89%, at least 90%, at least 91%, at least 92%, at least 93%, at least 94%, at least 95%, at least 96%, at least 97%, at least 98%, at least 99%, or 100% percent identity to an amino acid sequence selected from any one of SEQ ID NOs: 143-216. In embodiments, the linker has at least 80%, at least 81%, at least 82%, at least 83%, at least 84%, at least 85%, at least 86%, at least 87%, at least 88%, at least 89%, at least 90%, at least 91%, at least 92%, at least 93%, at least 94%, at least 95%, at least 96%, at least 97%, at least 98%, at least 99%, or 100% percent identity to an amino acid sequence selected from any one of SEQ ID NOs: 143-216 and 261. In embodiments, the linker has an amino acid sequence with at least 80%, at least 81%, at least 82%, at least 83%, at least 84%, at least 85%, at least 86%, at least 87%, at least 88%, at least 89%, at least 90%, at least 91%, at least 92%, at least 93%, at least 94%, at least 95%, at least 96%, at least 97%, at least 98%, at least 99%, or 100% identity to a polypeptide of SEQ ID NO: 261.

[0181] In embodiments, the linker is a polypeptide from Table 4.

TABLE 4
Exemplary amino acid sequences of linker sequences

| SEQ ID NO | SEQUENCE |
|---|---|
| 143 | (EAAAK)ₙ, wherein n is an integer in the range of 1-20, inclusive of endpoints |
| 144 | (G4S)ₙ, wherein n is an integer in the range of 1-30, inclusive of endpoints |
| 145 | (SGGG)ₙ, wherein n is an integer in the range of 1-50, inclusive of endpoints |
| 146 | (GGGS)ₙ, wherein n is an integer in the range of 1-20, inclusive of endpoints |
| 147 | KESGSVSSEQLAQFRSLD |
| 148 | EGKSSGSGSESKST |
| 149 | poly-(Gly)ₙ, wherein n is an integer in the range of 1-30, inclusive of endpoints |
| 150 | GKSSGSGSESKS |
| 151 | GSTSGSGKSSEGKG |
| 152 | GSTSGSGKSSEGSGSTKG |
| 153 | GSTSGSGKPGSGEGSTKG |
| 154 | EGKSSGSGSESKEF |
| 155 | SRSSG |
| 156 | SGSSC |
| 157 | EGRGSLLTCGDVEENPGP |
| 158 | ATNFSLLKQAGDVEENPGP |
| 159 | QCTNYALLKLAGDVESNPGP |
| 160 | VKQTLNFDLLKLAGDVESNPGP |
| 161 | GSGEGRGSLLTCGDVEENPGP |
| 162 | GSGATNFSLLKQAGDVEENPGP |
| 163 | GSGQCTNYALLKLAGDVESNPGP |
| 164 | GSGVKQTLNFDLLKLAGDVESNPGP |
| 165 | GGGGSGGSGGGGSGGRGS |
| 166 | AAAAA |
| 167 | AAAAAAAAAA |
| 168 | AAAAAAGGGGG |
| 169 | AGAGA |
| 170 | EKAREK |
| 171 | GAAGA |
| 172 | GASGAS |
| 173 | GEGEF |
| 174 | GGGGS |
| 175 | GGGGSGGGG |
| 176 | GGGGSGGGGS |
| 177 | GGGGSGGGGSGGGG |
| 178 | GGGGSGGGGSGGGGS |
| 179 | GGGGSGGGGSGGGGSGGGGS |
| 180 | GGGGSGGGGSGGGGSGGGGSGGGGS |
| 181 | GGGSGGGSGGG |
| 182 | GGSGGSGG |
| 183 | GGSGGS |
| 184 | GGSGGSGGS |
| 185 | GGSGGSGGSGGS |
| 186 | GPGGPG |
| 187 | GPGPG |
| 188 | GPGPGP |
| 189 | GPPGPP |
| 190 | GPSGPG |
| 191 | GPSGPS |
| 192 | GPSGSGPG |
| 193 | GSGGGGSGGGGSGGGGSGS |
| 194 | GSGGGGSGGGGSGS |
| 195 | GSGGGGSGS |
| 196 | GSGGGSGGGSGGGSGS |
| 197 | GSGS |
| 198 | GSGSAGSGSA |
| 199 | GSGSGS |
| 200 | GSGSGSGSG |
| 201 | GSSG |
| 202 | GSSGGGGS |
| 203 | KKKKKGGGGG |
| 204 | PAPAP |
| 205 | PGPGPGPGP |
| 206 | QPGSGP |
| 207 | SGAGSAGA |
| 208 | SGGSGG |
| 209 | SGGSGGSGG |
| 210 | SGGSGGSGGSGG |
| 211 | SGSGGSGGSGGSGG |
| 212 | SGSGSGSG |
| 213 | SSGSSGSS |
| 214 | TGTGGSGSGTG |
| 215 | TGTGGTGTGG |
| 216 | YPKYVKQNTLKLAT |
| 261 | GYGGGSASG |

[0182] In embodiments, the linker is a chemical linker. In embodiments, the chemical linker is selected from the group consisting of a carbohydrate linker, a lipid linker, a fatty acid linker, and a polyether linker.

[0183] In embodiments, the linker is a direct covalent linkage between an amino acid residue of the polypeptide with an amino acid residue of the polypeptide with phase behavior and a NBP. In embodiments, a fusion protein comprises the polypeptide with phase behavior and a NBP. In embodiments, an amino acid residue of the polypeptide with phase behavior is covalently linked to an amino acid in the Bs-CspB. In embodiments, the fusion protein further comprises one or more linkers as described herein. In embodiments, a fusion protein comprises, from N-terminus to C-terminus, a polypeptide with phase behavior, a linker, and a NBP. In embodiments, a fusion protein comprises, from N-terminus to C-terminus, a NBP, a linker, and a polypeptide with phase behavior. In embodiments, a fusion protein comprises, from C-terminus to N-terminus, a polypeptide with phase behavior, a linker, and a NBP. In embodiments, a fusion protein comprises, from C-terminus to N-terminus, a NBP, a linker, and a polypeptide with phase behavior. In embodiments, a fusion protein comprises, from N-terminus to C-terminus, one or more polypeptides with phase behavior, one or more linkers, and one or more NBPs. In embodiments, a fusion protein comprises, from N-terminus to C-terminus, one or more NBPs, one or more linkers, and one or more polypeptides with phase behavior.

Fusion Protein Construct Comprising Bs-CspB and a Polypeptide with Phase Behavior

[0184] In some embodiments, the fusion protein described herein comprises a Bs-CspB and a polypeptide with phase behavior. In embodiments, a fusion protein comprises, from N-terminus to C-terminus, a polypeptide with phase behavior, a linker, and a Bs-CspB. In embodiments, a fusion protein comprises, from N-terminus to C-terminus, a Bs-CspB, a linker, and a polypeptide with phase behavior. In embodiments, a fusion protein comprises, from C-terminus to N-terminus, a polypeptide with phase behavior, a linker, and a Bs-CspB. In embodiments, a fusion protein comprises, from C-terminus to N-terminus, a Bs-CspB, a linker, and a polypeptide with phase behavior.

[0185] In embodiments, the Bs-CspB has an amino acid sequence with at least 80%, at least 81%, at least 82%, at least 83%, at least 84%, at least 85%, at least 86%, at least 87%, at least 88%, at least 89%, at least 90%, at least 91%, at least 92%, at least 93%, at least 94%, at least 95%, at least 96%, at least 97%, at least 98%, at least 99%, or 100% identity to a polypeptide of SEQ ID NO: 90. In embodiments, the polypeptide with phase behavior has at least 80%, at least 81%, at least 82%, at least 83%, at least 84%, at least 85%, at least 86%, at least 87%, at least 88%, at least 89%, at least 90%, at least 91%, at least 92%, at least 93%, at least 94%, at least 95%, at least 96%, at least 97%, at least 98%, at least 99%, or 100% identity to a polypeptide of any one of SEQ ID NOs: 56, and 262-264. In embodiments, the polypeptide with phase behavior has at least 80%, at least 81%, at least 82%, at least 83%, at least 84%, at least 85%, at least 86%, at least 87%, at least 88%, at least 89%, at least 90%, at least 91%, at least 92%, at least 93%, at least 94%, at least 95%, at least 96%, at least 97%, at least 98%, at least 99%, or 100% identity to a polypeptide of SEQ ID NO: 56.

[0186] In embodiments, the fusion protein comprises at least 90% identity with a polypeptide of SEQ ID NO: 90 and at least 90% identity to a polypeptide of any one of SEQ ID NOs: 56, and 262-264. In embodiments, the fusion protein comprises at least 90% identity with a polypeptide of SEQ ID NOs: 90 and at least 90% identity with a polypeptide of SEQ ID NO: 56. In embodiments, the fusion protein comprises SEQ ID NO: 90 and any one of SEQ ID NOs: 56, 262-264. In embodiments, the fusion protein comprises SEQ ID NOs: 90 and SEQ ID NO: 56.

[0187] In embodiments, the fusion protein further comprises a linker. In embodiments, the linker has an amino acid sequence with at least 80%, at least 81%, at least 82%, at least 83%, at least 84%, at least 85%, at least 86%, at least 87%, at least 88%, at least 89%, at least 90%, at least 91%, at least 92%, at least 93%, at least 94%, at least 95%, at least 96%, at least 97%, at least 98%, at least 99%, or 100% identity to a polypeptide of SEQ ID NO: 261.

[0188] In embodiments, the fusion protein has an amino acid sequence with at least 80%, at least 81%, at least 82%, at least 83%, at least 84%, at least 85%, at least 86%, at least 87%, at least 88%, at least 89%, at least 90%, at least 91%, at least 92%, at least 93%, at least 94%, at least 95%, at least 96%, at least 97%, at least 98%, at least 99%, or 100% identity to a polypeptide of any one of SEQ ID NOs: 225 or 226. In embodiments, the fusion protein has at least 90% identity with a polypeptide of SEQ ID NO: 225 or 226. In embodiments, the fusion protein has at least 90% identity with a polypeptide of SEQ ID NO: 225. In embodiments, the fusion protein comprises SEQ ID NO: 225 or 226. In embodiments, the fusion protein comprises SEQ ID NO: 225. In embodiments, the fusion protein comprises a start codon. In embodiments, the start codon comprises a N-terminal methionine. In embodiments, the fusion protein comprises a N-terminal methionine. In embodiments, the fusion protein comprising a N-terminal methionine has an amino acid sequence of SEQ ID NO: 225. In embodiments, the fusion protein that does not comprise a N-terminal methionine has an amino acid sequence of SEQ ID NO: 226.

[0189] Exemplary sequences for the fusion protein described above are in Table 5.

TABLE 5
Amino acid sequences of a fusion protein comprising Bs-CspB and a polypeptide with
phase behavior.

| SEQ | | |
|---|---|---|
| ID | | |
| NO | ID | Sequence |
| 90 | Bs-CspB | LEGKVKWFNSEKGFGFIEVEGQDDVFVHFSAIQGEGFKTLEEGQAVSFEIVEGNR |
| | | GPQAANVTKEA |
| 56 | Polypeptide | MSKGPGVGVPGVGVPGVGVPGVGVPGVGVPGVGVPGVGVPGVGVPGVGVPGVG |
| | with phase | VPGVGVPGVGVPGVGVPGVGVPGVGVPGVGVPGVGVPGVGVPGVGVPGVGVPG |
| | behavior | VGVPGVGVPGVGVPGVGVPGVGVPGVGVPGVGVPGVGVPGVGVPGVGVPGVGV |
| | (100V80) | PGVGVPGVGVPGVGVPGVGVPGVGVPGVGVPGVGVPGVGVPGVGVPGVGVPGV |
| | | GVPGVGVPGVGVPGVGVPGVGVPGVGVPGVGVPGVGVPGVGVPGVGVPGVGVP |
| | | GVGVPGVGVPGVGVPGVGVPGVGVPGVGVPGVGVPGVGVPGVGVPGVGVPGVG |
| | | VPGVGVPGVGVPGVGVPGVGVPGVGVPGVGVPGVGVPGVGVPGVGVPGVGVPG |
| | | VGVPGVGVPGVGVPGVGVPGVGVPGVGVPGVGVP |
| 262 | Polypeptide | MGVGVPGVGVPGAGVPGVGVPGVGVPGVGVPGVGVPGAGVPGVGVPGVGVPG |
| | with phase | VGVPGVGVPGAGVPGVGVPGVGVPGVGVPGVGVPGAGVPGVGVPGVGVPGVG |
| | behavior | VPGVGVPGAGVPGVGVPGVGVPGVGVPGVGVPGAGVPGVGVPGVGVPGVGVP |
| | (20A80) | GVGVPGAGVPGVGVPGVGVPGVGVPGVGVPGAGVPGVGVPGVGVPGVGVPGV |
| | | GVPGAGVPGVGVPGVGVPGVGVPGVGVPGAGVPGVGVPGVGVPGVGVPGVGV |
| | | PGAGVPGVGVPGVGVPGVGVPGVGVPGAGVPGVGVPGVGVPGVGVPGVGVPG |
| | | AGVPGVGVPGVGVPGVGVPGVGVPGAGVPGVGVPGVGVPGVGVPGVGVPGAG |
| | | VPGVGVPGVGVPGVGVPGVGVPGAGVPGVGVPGVGVPGY |
| 263 | Polypeptide | MGAGVPGVGVPGAGVPGVGVPGAGVPGVGVPGAGVPGVGVPGAGVPGVGVPG |
| | with phase | AGVPGVGVPGAGVPGVGVPGAGVPGVGVPGAGVPGVGVPGAGVPGVGVPGAG |
| | behavior | VPGVGVPGAGVPGVGVPGAGVPGVGVPGAGVPGVGVPGAGVPGVGVPGAGVP |
| | (50A80) | GVGVPGAGVPGVGVPGAGVPGVGVPGAGVPGVGVPGAGVPGVGVPGAGVPGV |
| | | GVPGGAGVPGVGVPGAGVPGVGVPGAGVPGVGVPGAGVPGVGVPGAGVPGVG |
| | | VPGAGVPGVGVPGAGVPGVGVPGAGVPGVGVPGAGVPGVGVPGAGVPGVGVP |
| | | GAGVPGVGVPGAGVPGVGVPGAGVPGVGVPGAGVPGVGVPGAGVPGVGVPGA |
| | | GVPGVGVPGAGVPGVGVPGAGVPGVGVPGAGVPGVGVPGWP |
| 264 | Polypeptide | MSKGPGGVGVPGLGVPGVGVPGLGVPGVGVPGVGVPGLGVPGVGVPGLGVPGV |
| | with phase | GVPGVGVPGLGVPGVGVPGLGVPGVGVPGVGVPGLGVPGVGVPGLGVPGVGVP |
| | behavior | GVGVPGLGVPGVGVPGLGVPGVGVPGVGVPGLGVPGVGVPGLGVPGVGVPGVG |
| | (40L80) | VPGLGVPGVGVPGLGVPGVGVPGVGVPGLGVPGVGVPGLGVPGVGVPGVGVPG |
| | | LGVPGVGVPGLGVPGVGVPGVGVPGLGVPGVGVPGLGVPGVGVPGVGVPGLGV |
| | | PGVGVPGLGVPGVGVPGVGVPGLGVPGVGVPGLGVPGVGVPGVGVPGLGVPGV |
| | | GVPGLGVPGVGVPGVGVPGLGVPGVGVPGLGVPGVGVPGVGVPGLGVPGVGVP |
| | | GLGVPGVGVPGVGVPGLGVPGVGVPGLGVPGVGVPG |
| 261 | Linker | GYGGGSASG |
| 225 | Fusion | MSKGPGGVGVPGVGVPGVGVPGVGVPGVGVPGVGVPGVGVPGVGVPGVGVPGVGVP |
| | protein | GVGVPGVGVPGVGVPGVGVPGVGVPGVGVPGVGVPGVGVPGVGVPGVGVPGVGVPG |
| | with N- | VGVPGVGVPGVGVPGVGVPGVGVPGVGVPGVGVPGVGVPGVGVPGVGVPGVGVPGV |
| | terminal | GVPGVGVPGVGVPGVGVPGVGVPGVGVPGVGVPGVGVPGVGVPGVGVPGVGVPGVG |
| | metionine | VPGVGVPGVGVPGVGVPGVGVPGVGVPGVGVPGVGVPGVGVPGVGVPGVGVPGVGV |
| | | PGVGVPGVGVPGVGVPGVGVPGVGVPGVGVPGVGVPGVGVPGVGVPGVGVPGVGVP |
| | | GVGVPGVGVPGVGVPGVGVPGVGVPGVGVPGVGVPGVGVPGVGVPGVGVPGVGVPG |
| | | VGVPGVGVPGVGVPGYGGGSASGLEGKVKWFNSEKGFGFIEVEGQDDVFVHFSAIQGE |
| | | GFKTLEEGQAVSFEIVEGNRGPQAANVTKEA |
| 226 | Fusion | SKGPGGVGVPGVGVPGVGVPGVGVPGVGVPGVGVPGVGVPGVGVPGVGVPGVGVPG |
| | protein | VGVPGVGVPGVGVPGVGVPGVGVPGVGVPGVGVPGVGVPGVGVPGVGVPGVGVPGV |
| | without N- | GVPGVGVPGVGVPGVGVPGVGVPGVGVPGVGVPGVGVPGVGVPGVGVPGVGVPGVG |
| | terminal | VPGVGVPGVGVPGVGVPGVGVPGVGVPGVGVPGVGVPGVGVPGVGVPGVGVPGVGV |
| | methionine | PGVGVPGVGVPGVGVPGVGVPGVGVPGVGVPGVGVPGVGVPGVGVPGVGVPGVGVP |
| | | GVGVPGVGVPGVGVPGVGVPGVGVPGVGVPGVGVPGVGVPGVGVPGVGVPGVGVPG |
| | | VGVPGVGVPGVGVPGVGVPGVGVPGVGVPGVGVPGVGVPGVGVPGVGVPGVGVPGV |
| | | GVPGVGVPGVGVPGYGGGSASGLEGKVKWFNSEKGFGFIEVEGQDDVFVHFSAIQGEG |
| | | FKTLEEGQAVSFEIVEGNRGPQAANVTKEA |

### Methods of Using Fusion Proteins

[0190] The disclosure provides fusion proteins and methods of using the same. In embodiments, the fusion proteins comprise a nucleic acid binding protein (NBP) which binds to a nucleic acid and a polypeptide with phase behavior. In embodiments, the NBP comprises a Bs-CspB. In embodiments, a composition comprising a nucleic acid is free from one or more contaminants.

[0191] In embodiments, a method of purifying a nucleic acid comprises contacting the nucleic acid with a fusion protein; wherein the nucleic acid binds to the fusion protein to form a complex; wherein the size of the complex is increased by a first environmental factor; wherein the complex is separated from at least one contaminant on the basis of size; and wherein the nucleic acid is separated from the fusion protein by a second environmental factor.

[0192] In embodiments, a method of purifying a single stranded nucleic acid comprises contacting a composition comprising the single stranded nucleic acid and at least one contaminant with a fusion protein, wherein the fusion protein binds to the single stranded nucleic acid to form a complex, adding to the composition comprising the complex a first environmental factor, thereby increasing the size of the complex, separating the complex from at least one contaminant, and separating the single stranded nucleic acid from the fusion protein by contacting the complex with a second environmental factor, thereby forming a product comprising the single stranded nucleic acid. In embodiments, the single stranded nucleic acid comprises ssRNA, ssDNA or both. In embodiments, the single stranded nucleic acid comprises ssRNA. In embodiments, the at least one contaminant comprises double stranded RNA.

[0193] In embodiments, the method comprises separating a complex from at least one contaminant on the basis of size.

[0194] In embodiments, a method of purifying a nucleic acid comprises contacting the nucleic acid with a fusion protein; wherein the nucleic acid binds to the fusion protein to form a complex; wherein the size of the complex is increased; wherein the complex is separated from at least one contaminant on the basis of size; and wherein the nucleic acid is separated from the fusion protein by an environmental factor thereby forming a product comprising the nucleic acid. In embodiments, the nucleic acid comprises a single stranded nucleic acid. In embodiments, the nucleic acid comprises ssRNA. In embodiments, the contaminant comprises a double stranded nucleic acid. In embodiments, the contaminant comprises dsRNA.

[0195] In embodiments, a method of removing a contaminant from a composition comprising a nucleic acid comprises contacting the contaminant with a fusion protein; wherein the contaminant binds to the fusion protein to form a complex; wherein the size of the complex is increased by a first environmental factor; wherein the complex is separated from the nucleic acid on the basis of size; and wherein the contaminant is separated from the fusion protein by a second environmental factor thereby forming a product comprising the nucleic acid. In embodiments, the nucleic acid comprises a single stranded nucleic acid. In embodiments, the nucleic acid comprises ssRNA. In embodiments, the contaminant comprises a double stranded nucleic acid. In embodiments, the contaminant comprises dsRNA.

[0196] In some embodiments, a method of separating a first nucleic acid from a second nucleic acid comprises contacting the first nucleic acid with a first fusion protein and contacting the second nucleic acid with a second fusion protein; wherein the first nucleic acid binds to the first fusion protein to form a first complex; wherein the second nucleic acid binds to the second fusion protein to form a second complex; and separating the first nucleic acid from the second nucleic acid by applying an environmental factor. In embodiments, the first nucleic acid comprises a single stranded nucleic acid. In embodiments, the second nucleic acid comprises a double stranded nucleic acid.

[0197] Also provided herein is a method of bringing a nucleic acid in proximity to another nucleic acid. In embodiments, a method of bringing a first nucleic acid into proximity with a second nucleic acid comprises contacting the first nucleic acid with a first fusion protein and contacting the second nucleic acid with a second fusion protein; wherein the first nucleic acid binds to the first fusion protein to form a first complex; wherein the second nucleic acid binds to the second fusion protein to form a second complex; and wherein an environmental factor brings the first complex and second complex into proximity with one another. In embodiments, the methods described herein bring a first nucleic acid and a second nucleic acid within about 10 μm, about 5 μm, about 1 μm, about 900 nm, about 800 nm, about 700 nm, about 600 nm, about 500 nm, about 400 nm, about 300 nm, about 200 nm, about 100 nm, about 10 nm, about 1 nm, about 0.5 nm, or about 0.1 nm of one another. In embodiments, the first nucleic acid comprises a single stranded nucleic acid. In embodiments, the second nucleic acid comprises a double stranded nucleic acid.

[0198] In embodiments, the methods described herein utilize a fusion protein comprising a NBP and a polypeptide with phase behavior. In embodiments, the methods described herein utilize a fusion protein comprising a Bs-CspB and a polypeptide with phase behavior. In embodiments, the methods described herein utilize two or more distinct fusion proteins.

[0199] In embodiments, the methods described herein involve the formation of a complex. In embodiments, the methods described herein involve the formation of one or more complexes. In embodiments, the methods described herein involve the formation of one, two, three, four, five, or more complexes. The complexes may be referred to as “first complex” or “second complex,” and so on.

[0200] In embodiments, a complex comprises a fusion protein and a nucleic acid. In embodiments, a complex comprises a fusion protein and a contaminant. In embodiments, a complex comprises a fusion protein and a second protein such as an enzyme substrate, a metabolite, a ligand (e.g., a ligand that binds to a cellular receptor).

[0201] In embodiments, the components of the complex (e.g. the fusion protein and the nucleic acid) bind to each other. In embodiments, the binding is reversible. Reversible binding means that the complexes can dissociate, e.g., separate into individual components. For example, if a complex reversibly forms between the fusion protein and a nucleic acid, the fusion protein and the nucleic acid can subsequently disassociate. In embodiments, dissociation is triggered by an environmental factor. In embodiments, reversible binding allows for separation of a nucleic acid from the fusion protein. In embodiments, reversible binding allows for separation of a contaminant from the fusion protein. In embodiments, reversible binding allows for separation of the other molecule from the fusion protein. In embodiments, the nucleic acid comprises a single stranded nucleic acid. In embodiments, the nucleic acid comprises ssRNA. In embodiments, the contaminant comprises a double stranded nucleic acid. In embodiments, the contaminant comprises dsRNA.

[0202] In embodiments, reversible binding is non-covalent, i.e. no covalent bonds are formed between the interacting components of the complex (such as between the fusion protein and the nucleic acid). In embodiments, non-covalent interactions cause the fusion protein and the nucleic acid. Non-limiting examples of non-covalent interactions include dipole-dipole forces, van der Waals forces, London Dispersion forces, hydrogen bonding, hydrophobic interactions, and electrostatic interactions. In embodiments, non-covalent binding is disrupted by the addition of an environmental factor. In embodiments, the nucleic acid comprises a single stranded nucleic acid. In embodiments, the nucleic acid comprises ssRNA.

[0203] In embodiments, binding between the fusion protein and a target molecule (e.g., a nucleic acid) is covalent. In embodiments, a covalent bond between a fusion protein and a nucleic acid may be cleaved using, for example, a nuclease and/or a protease. In embodiments, the nucleic acid comprises a single stranded nucleic acid. In embodiments, the nucleic acid comprises ssRNA.

[0204] In embodiments, the size of the complexes described herein increase after an environmental factor is applied. In embodiments, the size of a complex formed between the fusion protein and nucleic acid increases. In embodiments, the size of the initial complex increases as a result of aggregation of multiple complexes. In embodiments, multiple complexes aggregate due to self-assembly of fusion proteins. In embodiments, multiple complexes aggregate due to the application of an environmental factor. In embodiments, the size increase is stabilized by non-covalent interactions between multiple fusion proteins. In embodiments, the size increase is stabilized by non-covalent interactions between the polypeptides with phase behavior. In embodiments, the non-covalent interactions are dipole-dipole forces, van der Waals forces, London Dispersion forces, hydrogen bonding, hydrophobic interactions, and/or electrostatic interactions. In embodiments, the nucleic acid comprises a single stranded nucleic acid. In embodiments, the nucleic acid comprises ssRNA.

[0205] In embodiments, the methods of the disclosure provide for the formation of multiple complexes in a mixture. In embodiments, the size of all of complexes increase. In embodiments, the size of some complexes increases, and the size of the other complexes remains constant. In embodiments, the size of one complex increases, and the size of the other complex remains constant.

[0206] In embodiments, the size of the initial complex increases by at least about 2-fold, at least about 5-fold, at least about 10-fold, at least about 15-fold, at least about 20-fold, at least about 25-fold, at least about 30-fold, at least about 35-fold, at least about 40-fold, at least about 45-fold, at least about 50-fold, at least about 55-fold, at least about 60-fold, at least about 65-fold, at least about 70-fold, at least about 75-fold, at least about 80-fold, at least about 85-fold, at least about 90-fold, at least about 95-fold, at least about 100-fold, or more. In embodiments, the size of the initial complex increases by at least about 2-fold. In embodiments, the size of the initial complex increases by at least about 5-fold. In embodiments, the size of the initial complex increases by at least about 10-fold. In embodiments, the size of the initial complex increases by at least about 25-fold.

[0207] As used herein, the phrase “increase in size” may refer to an increase in the diameter of the complex or an increase in the mass of the complex. In embodiments, the increase in size is an increase in the molar mass of the complex. In embodiments, the increase in size is an increase in the hydrodynamic radius of the complex.

[0208] In embodiments, the increase in size of the complex can be observed visually with an unaided eye. For example, the increase in size of the complex may cause a composition comprising the complex to change color, clarity, viscosity, and/or may cause the complex to change solubility (e.g., to precipitate from solution), wherein such change is observable by a human without the use of any special equipment.

[0209] In embodiments, a person of skill in the art may measure the increase in the size of the complex according to known methods in the art. In embodiments, the increase in the size of the complex can be measured utilizing a technique selected from the group consisting of x-ray scattering, small angle x-ray scattering, wide angle x-ray scattering, dynamic light scattering, analytical ultracentrifugation, size exclusion chromatography, and photon correlation spectroscopy.

[0210] In embodiments, the complex of increased size is separated from a contaminant. In embodiments, the complex of increased size containing a nucleic acid and a fusion protein is separated from a contaminant. In embodiments, the complex of increased size containing a contaminant and a fusion protein is separated from a composition containing a nucleic acid. In embodiments, the first complex of increased size containing a first nucleic acid and a first fusion protein is separated from a second complex containing a second nucleic acid and a second fusion protein. In embodiments, the complex of increased size containing a contaminant and a fusion protein is separated from a composition containing a nucleic acid. In embodiments, the first complex of increased size containing a first nucleic acid and a first fusion protein is separated from a second complex containing a second nucleic acid and a second fusion protein. In embodiments, the first nucleic acid comprises a single stranded nucleic acid. In embodiments, the second nucleic acid comprises a single stranded nucleic acid. In embodiments, the single stranded nucleic acid comprises ssRNA. In embodiments, the contaminant comprises a double stranded nucleic acid. In embodiments, the contaminant comprises dsRNA.

[0211] In embodiments, separation of the complex from a contaminant can be observed visually with an unaided eye.

[0212] In embodiments, separation of the complex from the contaminant is on the basis of size. In embodiments, the separation on the basis of size is performed using a technique selected from the group consisting of tangential flow filtration (TFF), analytical ultracentrifugation, membrane chromatography, high performance liquid chromatography, size exclusion chromatography, membrane chromatography, normal flow filtration, acoustic wave separation, centrifugation, counterflow centrifugation, and fast protein liquid chromatography. In embodiments, the complex is separated from at least one impurity on the basis of size using tangential flow filtration. In embodiments, the complex is separated from at least one impurity on the basis of size using centrifugation. In embodiments, between about 100 relative centrifugal force (RCF) and about 16,000 RCF, for example, about 500 to about 16,000 RCF, about 1,000 RCF to 16,000 RCF, are applied to separate the complex from at least one impurity. In embodiments, at least 500 relative centrifugal force (RCF) are applied to separate the complex from at least one impurity, for example, at least about 500 RCF, at least about 600 RCF, at least about 700 RCF, at least about 800 RCF, at least about 900 RCF, at least about 1000 RCF, at least about 2000 RCF, at least about 3000 RCF, at least about 3500 RCF, at least about 4000 RCF, at least about 5000 RCF, at least about 6000 RCF, at least about 7000 RCF, at least about 8000 RCF, at least about 9000 RCF, at least about 10,000 RCF, at least about 11,000 RCF, at least about 12,000 RCF, at least about 13,000 RCF, at least about 14,000 RCF, at least about 15,000 RCF, at least about 16,000 RCF, at least about 17,000 RCF, at least about 18,000 RCF, at least about 19,000 RCF, or at least about 20,000 RCF.

[0213] In embodiments, separation of the complex from the contaminant on the basis of size is performed using TFF. In embodiments, TFF may be used to separate the complex from at least one impurity on the basis of size, a process also referred to herein as “diafiltration.” Diafiltration comprises both washing and elution steps. Washing removes impurities contained in the composition comprising the complexes. Elution separates purified nucleic acids from the fusion protein. In embodiments, the complexes are concentrated using TFF. In embodiments, TFF may be used to increase the concentration of a complex within a composition, a process also referred to herein as “concentration.”

[0214] Tangential flow filtration employs both microfiltration and ultrafiltration membranes to separate molecules. Microfiltration membranes typically have pore sizes between 0.1 μm and 10 μm. Ultrafiltration membranes typically have smaller pore sizes than microfiltration membranes with pore sizes between 0.001 μm and 0.1 μm. In embodiments, a membrane with a pore size between about 0.001 μm and about 10 μm is utilized in the methods of the disclosure. In embodiments, the membrane has a pore size of about 0.001 μm, about 0.01 μm, about 0.05 μm, about 0.1 μm, about 0.2 μm, about 0.3 μm, about 0.4 μm, about 0.5 μm, about 0.6 μm, about 0.7 μm, about 0.8 μm, about 0.9 μm, about 1.0 μm, about 2 μm, about 3 μm, about 4 μm, about 5 μm, about 6 μm, about 7 μm, about 8 μm, about 9 μm, or about 10 μm, including all values and ranges in between thereof. In embodiments, the membrane has a pore size of about 0.1 μm. In embodiments, the membrane has a pore size of about 0.2 μm.

[0215] In embodiments, the membrane is made of hydrophilized poly(vinylildene difluoride) (PVDF), polyetheresulfone (PES), cellulose phosphate, diethylaminoethyl cellulose, polysufone, regenerated cellulose, nylon, cellulose nitrate, cellulose acetate, pegylated PES, modified polyethersulfone, and sulfonated PES, or modified derivatives thereof of the aforementioned materials.

[0216] In TFF, a membrane is placed tangentially to the flow of a fluid mixture to cause the fluid mixture to flow tangentially over a first side of the membrane. At the same time, a fluid media is placed in contact with a second surface of the membrane. A transmembrane pressure is the force that drives fluid through the membrane, carrying along permeable molecules.

[0217] In embodiments, separation of the complex from the contaminant on the basis of size is performed using TFF with a transmembrane pressure of between about 0.1 bar to about 3 bar. In embodiments, the transmembrane pressure is about 0.1 bar, about 0.2 bar, about 0.3 bar, about 0.4 bar, about 0.5 bar, about 0.6 bar, about 0.7 bar, about 0.8 bar, about 0.9 bar, about 1.0 bar, about 1.1 bar, about 1.2 bar, about 1.3 bar, about 1.4 bar, about 1.5 bar, about 1.6 bar, about 1.7 bar, about 1.8 bar, about 1.9 bar, about 2.0 bar, about 2.1 bar, about 2.2 bar, about 2.3 bar, about 2.4 bar, about 2.5 bar, about 2.6 bar, about 2.7 bar, about 2.8 bar, about 2.9 bar, or about 3.0 bar, including all values and ranges in between. In embodiments, the transmembrane pressure is about 1.5 bar.

[0218] In embodiments, the cross flow rate is tuned to improve the separation of the complexes described herein from the contaminant. The cross flow rate is the rate of solution flow through the feed channel and across the membrane. It provides the force that sweeps away molecules that can restrict filtrate flow. In embodiments, the cross flow rate is between about 500 L/m²/h and about 2000 L/m²/h. In embodiments, the cross flow rate is between about 500 L/m²/h, about 600 L/m²/h, about 700 L/m²/h, about 800 L/m²/h, about 900 L/m²/h, about 1000 L/m²/h, about 1100 L/m²/h, about 1200 L/m²/h, about 1300 L/m²/h, about 1400 L/m²/h, about 1500 L/m²/h, about 1600 L/m²/h, about 1700 L/m²/h, about 1800 L/m²/h, about 1900 L/m²/h, or about 2000 L/m²/h, including all values and ranges in between thereof. In embodiments, the cross flow rate is about 960 L/m²/h. In embodiments, TFF separation occurs by using a membrane that retains the complex containing the fusion protein and the nucleic while passing the contaminant. In embodiments, a membrane that retains the complex containing the fusion protein and the contaminant while passing the nucleic acid is used. In embodiments, a membrane that retains the complex containing the fusion protein and the contaminant while passing the nucleic acid is utilized. In embodiments, a membrane that retains the first complex containing the fusion protein and the first nucleic acid while passing the complex containing the second fusion protein and second nucleic acid is utilized. In embodiments, the first and second nucleic acid comprise a single stranded nucleic acid. In embodiments, the first and second nucleic acid comprise ssRNA. In embodiments, the contaminant comprises a double stranded nucleic acid. In embodiments, the contaminant comprises dsRNA.

[0219] In embodiments, the methods described herein enable the purification of at least 0.1 kg, at least about 0.2 kg, at least about 0.3 kg, at least about 0.4 kg, at least about 0.5 kg, at least about 0.6 kg, at least about 0.7 kg, at least about 0.8 kg, at least about 0.9 kg, at least about 1 kg, at least about 2 kg, at least about 3 kg, at least about 4 kg, at least about 5 kg, at least about 6 kg, at least about 7 kg, at least about 8 kg, at least about 9 kg, at least about 10 kg, or more of nucleic acid per day, including all values and ranges in between.

[0220] In embodiments, the methods described herein are completed in about 0.5 hr to about 24 hours. In embodiments, the methods are completed in about 0.5 hr, about 1 hr, about 2 hr, about 3 hr, about 4 hr, about 5 hr, about 6 hr, about 7 hr, about 8 hr, about 9 hr, about 10 hr, about 11 hr, about 12 hr, about 13 hr, about 14 hr, about 15 hr, about 16 hr, about 17 hr, about 18 hr, about 19 hr, about 20 hr, about 21 hr, about 22 hr, about 23 hr, or about 24 hr. In embodiments, the methods described herein are completed in about 0.5 hr to about 8 hr. In embodiments, the methods of the disclosure are completed in about 2 hr to about 6 hr.

[0221] In embodiments, the methods described herein produce a final product comprising a proportion of a target nucleic acid based on a total nucleic acid content. In embodiments, the proportion of the target nucleic acid based on the total nucleic acid content can be calculated as a purification yield. In embodiments, the nucleic acid is a single stranded nucleic acid.

[0222] In embodiments, the purification yield of the nucleic acid is at least 70%, at least 80%, at least 81%, at least 82%, at least 83%, at least 84%, at least 85%, at least 86%, at least 87%, at least 88%, at least 89%, at least 90%, at least 91%, at least 92%, at least 93%, at least 94%, at least 95%, at least 96%, at least 97%, at least 98%, or at least 99%.

[0223] In embodiments, the nucleic acid is purified to at least 70%, at least 80%, at least 81%, at least 82%, at least 83%, at least 84%, at least 85%, at least 86%, at least 87%, at least 88%, at least 89%, at least 90%, at least 91%, at least 92%, at least 93%, at least 94%, at least 95%, at least 96%, at least 97%, at least 98%, or at least 99%.

[0224] In embodiments, the purification yield of the single stranded nucleic acid is at least 70%, at least 80%, at least 81%, at least 82%, at least 83%, at least 84%, at least 85%, at least 86%, at least 87%, at least 88%, at least 89%, at least 90%, at least 91%, at least 92%, at least 93%, at least 94%, at least 95%, at least 96%, at least 97%, at least 98%, or at least 99% purity.

[0225] In embodiments, the single stranded nucleic acid is purified to at least 70%, at least 80%, at least 81%, at least 82%, at least 83%, at least 84%, at least 85%, at least 86%, at least 87%, at least 88%, at least 89%, at least 90%, at least 91%, at least 92%, at least 93%, at least 94%, at least 95%, at least 96%, at least 97%, at least 98%, or at least 99%.

[0226] In embodiments, the purification yield of the ssRNA is at least 70%, at least 80%, at least 81%, at least 82%, at least 83%, at least 84%, at least 85%, at least 86%, at least 87%, at least 88%, at least 89%, at least 90%, at least 91%, at least 92%, at least 93%, at least 94%, at least 95%, at least 96%, at least 97%, at least 98%, or at least 99%.

[0227] In embodiments, the ssRNA is purified to at least 70%, at least 80%, at least 81%, at least 82%, at least 83%, at least 84%, at least 85%, at least 86%, at least 87%, at least 88%, at least 89%, at least 90%, at least 91%, at least 92%, at least 93%, at least 94%, at least 95%, at least 96%, at least 97%, at least 98%, or at least 99%.

[0228] In embodiments, the purified nucleic acid retains its biological activity and/or structure. In embodiments, the purified nucleic acid has enhanced biological activity. In embodiments, the purified single stranded nucleic acid retains its biological activity and/or structure. In embodiments, the purified single stranded nucleic acid has enhanced biological activity. In embodiments, the ssRNA retains its biological activity and/or structure. In embodiments, the purified ssRNA has enhanced biological activity.

[0229] In embodiments, at least 400 g/m² (grams of nucleic acid per m² of filter membrane) are purified per day. In embodiments, at least 400 g/m², at least 500 g/m², at least 600 g/m², at least 700 g/m², at least 800 g/m², at least 900 g/m², or at least 1000 g/m² of nucleic are purified per day. In embodiments, the nucleic acid is e.g., mRNA, ssRNA or a virus. In embodiments, the nucleic acid is ssRNA.

[0230] In embodiments, at least about 150 g/L (grams of nucleic per liters of fusion protein) are purified per day. In embodiments, at least about 150 g/L, at least about 200 g/L, at least about 250 g/L, at least about 300 g/L, at least about 350 g/L, at least about 400 g/L, at least about 450 g/L, at least about 500 g/L, at least about 550 g/L, at least about 600 g/L, at least about 650 g/L, at least about 700 g/L, at least about 750 g/L, at least about 800 g/L, at least about 850 g/L, at least about 900 g/L, at least about 950 g/L, or at least about 1000 g/L are purified per day. In embodiments, the nucleic acid is e.g., mRNA, ssRNA, or a virus. In embodiments, the nucleic acid is ssRNA.

[0231] In embodiments, the product comprises about 70% to about 100% of the single stranded nucleic acid. In embodiments, the product comprises at least 70%, at least 80%, at least 81%, at least 82%, at least 83%, at least 84%, at least 85%, at least 86%, at least 87%, at least 88%, at least 89%, at least 90%, at least 91%, at least 92%, at least 93%, at least 94%, at least 95%, at least 96%, at least 97%, at least 98%, or at least 99% of the single nucleic acid. In embodiments, the single stranded nucleic acid comprises ssRNA.

[0232] In embodiments, a final product comprises about 10% or less of the at least one contaminant. In embodiments, the product comprises about 0.1%, about 1%, about 2%, about 3%, about 4%, about 5%, about 6%, about 7%, about 8%, about 9%, or about 10% of the at least one contaminant. In the embodiments, the purification method comprises at least about a 3-log removal of a contaminant in the final product compared to an amount of a contaminant in an original composition. In the embodiments, the purification method comprises least about a 1-log, 2-log, 3-log, 4-log, 5-log, 6-log, 7-log, 8-log, 9-log or 10-log removal of a contaminant compared to an amount of a contaminant in an original composition. In the embodiments, the purification method comprises at least about a 3-log removal to 10-log removal of a contaminant compared to an amount of a contaminant in an original composition. In embodiments, the contaminant comprises dsRNA.

[0233] In embodiments, the fusion protein is present at a concentration of about 1 μM to about 200 μM (e.g., 1, 5, 10, 15, 20, 25, 30, 35, 40, 45, 50, 55, 60, 65, 70, 75, 80, 85, 90, 95, 100, 105, 110, 115, 120, 125, 130, 135, 140, 145, 150, 155, 160, 165, 170, 175, 180, 185, 190, 195, or 200 μM, including all ranges and values therein). In embodiments, the fusion protein is present at a concentration of about 30 μM to about 50 μM. In embodiments, the fusion protein is present at a concentration of about 40 μM.

### Environmental Factors

[0234] In embodiments, one or more environmental factors are applied to cause a change of a complex comprising the fusion protein and nucleic acid. In embodiments, the one or more environmental factors cause the size of a complex comprising the fusion protein and nucleic acid to increase. In embodiments, the one or more environmental factors cause the polypeptide with phase behavior to aggregate. In embodiments, the one or more environmental factors causes separation of the fusion protein from the nucleic acid. In embodiments, the one or more environmental factors causes separation of the fusion protein from the contaminant. In embodiments, the one or more environmental factors enables the nucleic acid to retain its native structure, function, and activity.

[0235] In embodiments, the environmental factor is a change in temperature. In embodiments, the temperature is increased about 0.5° C., about 1° C., about 2° C., about 3° C., about 4° C., about 5° C., about 6° C., about 7° C., about 8° C., about 9° C., about 10° C., about 11° C., about 12° C., about 13° C., about 14° C., about 15° C., about 16° C., about 17° C., about 18° C., about 19° C., about 20° C., about 21° C., about 22° C., about 23° C., about 24° C., about 25° C., about 26° C., about 27° C., about 28° C., about 29° C., about 30° C., about 31° C., about 32° C., about 33° C., about 34° C., about 35° C., about 36° C., about 37° C., about 38° C., about 39° C., or about 40° C. In embodiments, the temperature is decreased about 0.5° C., about 1° C., about 2° C., about 3° C., about 4° C., about 5° C., about 6° C., about 7° C., about 8° C., about 9° C., about 10° C., about 11° C., about 12° C., about 13° C., about 14° C., about 15° C., about 16° C., about 17° C., about 18° C., about 19° C., about 20° C., about 21° C., about 22° C., about 23° C., about 24° C., about 25° C., about 26° C., about 27° C., about 28° C., about 29° C., about 30° C., about 31° C., about 32° C., about 33° C., about 34° C., about 35° C., about 36° C., about 37° C., about 38° C., about 39° C., or about 40° C.

[0236] In embodiments, the environmental factor is a change in pH. In embodiments, the pH is increased by about 0.1, about 0.2, about 0.3, about 0.4, about 0.5, about 0.6, about 0.7, about 0.8, about 0.9, about 1.0, about 1.1, about 1.2, about 1.3, about 1.4, about 1.5, about 1.6, about 1.7, about 1.8, about 1.9, about 2.0, about 2.1, about 2.2, about 2.3, about 2.4, about 2.5, about 2.6, about 2.7, about 2.8, about 2.9, about 3.0, about 3.1, about 3.2, about 3.3, about 3.4, about 3.5, about 3.6, about 3.7, about 3.8, about 3.9, about 4.0, about 4.1, about 4.2, about 4.3, about 4.4, about 4.5, about 4.6, about 4.7, about 4.8, about 4.9, about 5.0, about 5.1, about 5.2, about 5.3, about 5.4, about 5.5, about 5.6, about 5.7, about 5.8, about 5.9, or about 6.0 units. In embodiments, the pH is decreased by about 0.1, about 0.2, about 0.3, about 0.4, about 0.5, about 0.6, about 0.7, about 0.8, about 0.9, about 1.0, about 1.1, about 1.2, about 1.3, about 1.4, about 1.5, about 1.6, about 1.7, about 1.8, about 1.9, about 2.0, about 2.1, about 2.2, about 2.3, about 2.4, about 2.5, about 2.6, about 2.7, about 2.8, about 2.9, about 3.0, about 3.1, about 3.2, about 3.3, about 3.4, about 3.5, about 3.6, about 3.7, about 3.8, about 3.9, about 4.0, about 4.1, about 4.2, about 4.3, about 4.4, about 4.5, about 4.6, about 4.7, about 4.8, about 4.9, about 5.0, about 5.1, about 5.2, about 5.3, about 5.4, about 5.5, about 5.6, about 5.7, about 5.8, about 5.9, or about 6.0 units.

[0237] In embodiments, the environmental factor is change in ionic strength. In embodiments, the change in ionic strength is brought about by increasing the concentration of salt. In embodiments, the change in ionic strength is brought about by decreasing the concentration of salt. Non-limiting examples of salts include sodium chloride, potassium chloride, ammonium chloride, sodium acetate, sodium citrate, copper sulfate, sodium iodide, ammonium sulfate, and sodium sulfate. In embodiments, dialysis is used to change the concentration of salt in the composition containing the fusion protein and nucleic acid and/or contaminant. In embodiments, the salt is added at a concentration comprising about 0.5 M to about 3 M (e.g., 0.5, 1, 1.5, 2, 2.5, or 3 M, including any ranges or values therein).

[0238] In embodiments, the environmental factor is the addition of a cofactor. Non-limiting examples of cofactors include calcium, magnesium, cobalt, copper, zinc, iron, manganese, selenium, molybdenum, potassium, coenzyme A (CoA), a nucleoside triphosphate, and a vitamin. In embodiments, the cofactor is calcium. In embodiments, the nucleoside triphosphate is adenosine triphosphate, uridine triphosphate, guanosine triphosphate, cytidine triphosphate, or thymidine triphosphate. In embodiments, the vitamin is fat-soluble. In embodiments, the vitamin is water-soluble. Non-limiting examples of vitamins include vitamin A, vitamin B1 (thiamine), vitamin B2 (riboflavin), vitamin B3 (niacin or niacinamide), vitamin B5 (pantothenic acid), Vitamin B6 (pyridoxine, pyridoxal, or pyridoxamine, or pyridoxine hydrochloride), vitamin B7 (biotin), vitamin B9 (folic acid), vitamin B12, vitamin C, vitamin D, Vitamin E, vitamin K, K1, and K2, folic acid, and biotin.

[0239] In embodiments, the environmental factor is a change in the concentration of the fusion protein. In embodiments, the environmental factor is a change in the concentration of the nucleic acid. In embodiments, the environmental factor is a change in the concentration of the contaminant.

[0240] In embodiments, the environmental factor is a change in pressure of the composition containing the fusion protein and nucleic acid. In embodiments, the environmental factor is a change in pressure of the composition containing the fusion protein and contaminant. In embodiments, a change in pressure can be effected by increasing or decreasing the volume of the composition.

[0241] In embodiments, the environmental factor is the addition of one or more surfactants. In embodiments, the one or more surfactants are selected from free fatty acid salts, soaps, fatty acid sulfonates, such as sodium lauryl sulfate, ethoxylated compounds, such as ethoxylated propylene glycol, lecithin, polygluconates, quaternary ammonium salts, lignin sulfonates, 3-((3-cholamidopropyl) dimethylammonio)-1-propanesulfonate (CHAPS), sugars, including sucrose and glucose, Triton X-100, and NP-40. In embodiments, the surfactant is anionic, nonionic, or amphoteric.

[0242] In embodiments, the environmental factor is the addition of one or more molecular crowding agents. Non-limiting examples of molecular crowding agents include polyethylene glycol, dextran, and ficoll. Non-limiting examples of PEGS include PEG400, PEG1450, PEG3000, PEG8000, and PEG10000.

[0243] In embodiments, the environmental factor is the addition of one or more oxidizing agents. Non-limiting examples of oxidizing agents include hydrogen peroxide, hydrophilically or hydrophobically activated hydrogen peroxide, preformed peracids, monopersulfate or hypochlorite.

[0244] In embodiments, the environmental factor is the addition of one or more reducing agents. In embodiments, the one or more reducing agents is selected from the group consisting of dithiothreitol (DTT), 2-mercaptoethanol (BME), Tris (2-carboxyethyl) phosphine (TCEP), hydrazine, boron hydrides, amine boranes, lower alkyl substituted amine boranes, triethanolamine, and N,N,N′,N′-tetramethylethylenediamine (TEMED).

[0245] In embodiments, the environmental factor is the addition of one or more denaturing agents. Non-limiting examples of denaturing agents include urea, guanidine hydrochloride, guanidine, sodium salicylate, dimethyl sulfoxide, and propylene glycol.

[0246] In embodiments, the environmental factor is the addition of one or more enzymes. Non-limiting examples of enzymes include proteases, kinases, phosphatases, synthetases, transferases, nucleases such as restriction endonucleases, lyases, isomerases, dehydrogenases, decarboxylases, and lipases.

[0247] In embodiments, the environmental factor is the application of electromagnetic waves. In embodiments, the environmental factor is the application of light. In embodiments, the electromagnetic waves have a wavelength between about 0.0001 nm and about 100 m. In embodiments, the electromagnetic waves are selected from the group consisting of gamma rays, x-rays, ultraviolet, visible, infrared, and radio waves. In embodiments, the electromagnetic waves are gamma rays. In embodiments, the gamma rays have a wavelength between about 0.0001 nm and about 0.01 nm, e.g. 0.0001 nm, 0.0005 nm, 0.001 nm, 0.002 nm, 0.003 nm, 0.004 nm, 0.005 nm, 0.006 nm, 0.007 nm, 0.008 nm, 0.009 nm, and 0.01 nm. In embodiments, the x-rays have a wavelength between about 0.01 nm and 10 nm, e.g. about 0.01 nm, 0.02 nm, 0.03 nm, 0.04 nm, 0.05 nm, 0.06 nm, 0.07 nm, 0.08 nm, 0.09 nm, 0.10 nm, 0.2 nm, 0.3 nm, 0.4 nm, 0.5 nm, 0.6 nm, 0.7 nm, 0.8 nm, 0.9 nm, 1 nm, 2 nm, 3 nm, 4 nm, 5 nm, 6 nm, 7 nm, 8 nm, 9 nm, or about 10 nm. In embodiments, the ultraviolet radiation has a wavelength between about 10 nm about 400 nm, e.g. about 10 nm, about 20 nm, about 30 nm, about 40 nm, about 50 nm, about 60 nm, about 70 nm, about 80 nm, about 90 nm, about 100 nm, about 150 nm, about 200 nm, about 250 nm, about 280 nm, about 300 nm, about 350 nm, or about 400 nm. In embodiments, the visible waves have a wavelength of between about 400 nm and about 800 nm, e.g. about 400 nm, about 450 nm, about 500 nm, about 550 nm, about 600 nm, about 650 nm, about 700 nm, about 750 nm, or about 800 nm. In embodiments, the infrared radiation has a wavelength of between about 800 nm and about 0.1 cm, e.g. about 800 nm, about 1 μm, about 2 μm, about 3 μm, about 4 μm, about 5 μm, about 6 μm, about 7 μm, about 8 μm, about 9 μm, about 10 μm, about 20 μm, about 30 μm, about 40 μm, about 50 μm, about 60 μm, about 70 μm, about 80 μm, about 90 μm, about 100 μm, about 200 μm, about 300 μm, about 400 μm, about 500 μm, about 600 μm, about 700 μm, about 800 μm, about 900 μm, or about 0.1 cm. In embodiments, the radio waves has a wavelength of between about 0.1 cm and 100 m, e.g. about 0.1 cm, about 1 cm, about 10 cm, about 100 cm, about 1000 cm, about 2000 cm, about 3000 cm, about 4000 cm, about 5000 cm, about 6000 cm, about 7000 cm, about 8000 cm, about 9000 cm, or about 100 m.

[0248] In embodiments, the environmental factor is the application of acoustic waves. In embodiments, the acoustic waves have a frequency between about 1 Hz and 2000 kHz. In embodiments, the acoustic waves have a frequency of about 1 Hz, about 5 Hz, about 10 Hz, about 20 Hz, about 30 Hz, about 40 Hz, about 50 Hz, about 60 Hz, about 70 Hz, about 80 Hz, about 90 Hz, about 100 Hz, about 200 Hz, about 300 Hz, about 400 Hz, about 500 Hz, about 600 Hz, about 700 Hz, about 800 Hz, about 900 Hz, about 1 kHz, about 100 kHz, about 200 kHz, about 300 kHz, about 400 kHz, about 500 kHz, about 600 kHz, about 700 kHz, about 800 kHz, about 900 kHz, about 1000 kHz, about 1100 kHz, about 1200 kHz, about 1300 kHz, about 1400 kHz, about 1500 kHz, about 1600 kHz, about 1700 kHz, about 1800 kHz, about 1900 kHz, or about 2000 kHz.

### NUMBERED EMBODIMENTS

[0249] In addition to the appended claims, the following numbered embodiments also form part of the instant disclosure.

[0250] 1. A fusion protein comprising a nucleic acid binding protein (NBP) and a polypeptide with phase behavior.

[0251] 2. The fusion protein of claim 1, wherein the NBP is selected from any one of: RNA-specific adenosine deaminase 1 (ADAR1), ADAR1 double stranded RNA-binding domain 3 (dsRBD3), Bacillus subtilis cold shock protein B (Bs-CspB), cold shock domain Y-box protein (CSD-Ybox), eukaryotic translation initiation factor 4E (eIF4e), Fox-1 protein (FOX1), heterogenous nuclear ribonucleoprotein Q1 (hnRNPQ1), Homo sapiens zinc finger CCCH-Type containing 14 (HsZC3H14), polyA-binding protein (PABP), polyA-binding protein nuclear 1 (PABPN1), pentatricopeptide repeat protein A (PPRpA), Pumilio-like repeat protein A (PUFpA), Staufen, 12-O-tetradecanoylphorbol-13-acetate inducible sequence 11 D (TIS11D), Z-DNA/RNA binding protein 1 (ZBP1), and Zinc Finger Nuclease (ZNF).

[0252] 3. The fusion protein of claim 1, wherein the NBP has an amino acid sequence with at least 80%, at least 81%, at least 82%, at least 83%, at least 84%, at least 85%, at least 86%, at least 87%, at least 88%, at least 89%, at least 90%, at least 91%, at least 92%, at least 93%, at least 94%, at least 95%, at least 96%, at least 97%, at least 98%, at least 99%, or 100% identity to a polypeptide of any one of SEQ ID NOS: 61-103.

[0253] 4. The fusion protein of any one of claims 1-3, wherein the NBP is selected from any one of: ADAR1 double stranded RNA-binding domain 3 (dsRBD3), heterogenous nuclear ribonucleoprotein Q1 (hnRNPQ1), Homo sapiens zinc finger CCCH-Type containing 14 (HsZC3H14), polyA-binding protein nuclear 1 (PABPN1), pentatricopeptide repeat protein A (PPRpA), and Pumilio-like repeat protein A (PUFpA).

[0254] 5. The fusion protein of any one of claims 1-4, wherein the NBP has an amino acid sequence with at least 80%, at least 81%, at least 82%, at least 83%, at least 84%, at least 85%, at least 86%, at least 87%, at least 88%, at least 89%, at least 90%, at least 91%, at least 92%, at least 93%, at least 94%, at least 95%, at least 96%, at least 97%, at least 98%, at least 99 or 100% identity to a polypeptide of any one of SEQ ID NOS: 89, 93, 95, or 97-99.

[0255] 6. The fusion protein of any one of claims 1-5, wherein the polypeptide with phase behavior has at least 80%, at least 81%, at least 82%, at least 83%, at least 84%, at least 85%, at least 86%, at least 87%, at least 88%, at least 89%, at least 90%, at least 91%, at least 92%, at least 93%, at least 94%, at least 95%, at least 96%, at least 97%, at least 98%, at least 99%, or 100% identity to a polypeptide of any one of SEQ ID NOS: 1-60 or 217.

[0256] 7. The fusion protein of any one of claims 1-6, wherein the polypeptide with phase behavior has at least 80%, at least 81%, at least 82%, at least 83%, at least 84%, at least 85%, at least 86%, at least 87%, at least 88%, at least 89%, at least 90%, at least 91%, at least 92%, at least 93%, at least 94%, at least 95%, at least 96%, at least 97%, at least 98%, at least 99%, or 100% identity to a polypeptide of any one of SEQ ID NOS: 57 or 60.

[0257] 8. The fusion protein of any one of claims 1-7, comprising a linker.

[0258] 9. The fusion protein of claim 8, wherein the linker has an amino acid sequence with at least 80%, at least 81%, at least 82%, at least 83%, at least 84%, at least 85%, at least 86%, at least 87%, at least 88%, at least 89%, at least 90%, at least 91%, at least 92%, at least 93%, at least 94%, at least 95%, at least 96%, at least 97%, at least 98%, at least 99%, or 100% identity to a polypeptide of any one of SEQ ID NOS: 143-216.

[0259] 10. The fusion protein of any one of claims 1-9, wherein the NBP binds to RNA, DNA, or both.

[0260] 11. The fusion protein of any one of claims 1-10, wherein the NBP binds to RNA selected from any one of double stranded RNA (dsRNA), single stranded RNA (ssRNA), mRNA, pre-mRNA, polyadenosine (polyA) RNA, Z-confirmation RNA (Z-RNA), or a combination thereof.

[0261] 12. The fusion protein of any one of claims 1-11, wherein the NBP binds to the 3′-terminus of mRNA, the 3′-terminus of mRNA, a 3′ untranslated region (UTR) of mRNA, a polyA tail of mRNA, or an AU-rich element, or combination thereof, of mRNA.

[0262] 13. The fusion protein of any one of claims 1-11, wherein the NBP binds to a pre-mRNA.

[0263] 14. The fusion protein of claim 13, wherein the NBP binds to an intron, exon, polyA tail, or combination thereof, of the pre-mRNA.

[0264] 15. The fusion protein of any one of claims 1-10, wherein the NBP binds to DNA.

[0265] 16. The fusion protein of claim 15, wherein the NBP binds to single stranded DNA, double stranded DNA, polyadenosine (polyA) DNA, Z-conformation DNA (Z-DNA), or a combination thereof.

[0266] 17. A nucleic acid encoding the fusion protein of any one of claims 1-16.

[0267] 18. The nucleic acid of claim 17 having a sequence with at least 80%, at least 81%, at least 82%, at least 83%, at least 84%, at least 85%, at least 86%, at least 87%, at least 88%, at least 89%, at least 90%, at least 91%, at least 92%, at least 93%, at least 94%, at least 95%, at least 96%, at least 97%, at least 98%, at least 99%, or 100% identity to a nucleic acid of any one of SEQ ID NOS: 119-133.

[0268] 19. A vector encoding a fusion protein of any one of claims 1-16.

[0269] 20. A vector comprising the nucleic acid of any one of claims 17-18.

[0270] 21. A vector having at least 80%, at least 81%, at least 82%, at least 83%, at least 84%, at least 85%, at least 86%, at least 87%, at least 88%, at least 89%, at least 90%, at least 91%, at least 92%, at least 93%, at least 94%, at least 95%, at least 96%, at least 97%, at least 98%, at least 99%, or 100% identity to a nucleic acid of any one of SEQ ID NOS: 104-118, 134, and 135.

[0271] 22. A method of purifying a nucleic acid comprising: (i) contacting a composition comprising the nucleic acid and at least one contaminant with a fusion protein of any one of claims 1-16, wherein the fusion protein binds to the nucleic acid to form a complex; (ii) contacting the complex with a first environmental factor to increase the size of the complex; (iii) separating the complex from at least one contaminant; and (iv) separating the nucleic acid from the fusion protein by contacting the complex with a second environmental factor.

[0272] 23. The method of claim 22, wherein the complex is separated from the at least one contaminant on the basis of size.

[0273] 24. The method of claim 23, wherein the separation on the basis of size is performed using a method selected from any one of tangential flow filtration, membrane chromatography, analytical ultracentrifugation, high performance liquid chromatography, membrane chromatography, normal flow filtration, acoustic wave separation, centrifugation, counterflow centrifugation, and fast protein liquid chromatography.

[0274] 25. The method of any one of claims 22-24, wherein the first environmental factor comprises one or more of: (a) a change in one or more of temperature, pH, salt concentration, concentration of the purification matrix, concentration of the viral particle, or pressure; (b) the addition of one or more surfactants, cofactor, vitamin, molecular crowding agents, reducing agents, oxidizing agents, enzymes, or denaturing agents; or (c) the application of electromagnetic or acoustic waves.

[0275] 26. The method of any one of claims 22-25, wherein the second environmental factor comprises one or more of: (a) a change in one or more of temperature, pH, salt concentration, concentration of the purification matrix, concentration of the viral particle, or pressure; (b) the addition of one or more surfactants, cofactor, vitamin, molecular crowding agents, reducing agents, oxidizing agents, enzymes, or denaturing agents; or (c) the application of electromagnetic or acoustic waves.

[0276] 27. The method of any one of claims 22-26, wherein the at least one contaminant is selected from a solvent, a protein, a peptide, a carbohydrate, a nucleic acid, a virus, a cell (e.g., a bacterial, yeast, or mammalian cell), a carbohydrate, a lipid, or a lipopolysaccharide.

### EXAMPLES

### Example 1. Design of Fusion Proteins Containing Nucleic Acid Binding Proteins and Polypeptides with Phase Behavior

[0277] A fusion protein comprising an NBP and a polypeptide with phase behavior is generated and characterized. The NBP comprises a sequence with at least 80, at least 81%, at least 82%, at least 83%, at least 84%, at least 85%, at least 86%, at least 87%, at least 88%, at least 89%, at least 90%, at least 91%, at least 92%, at least 93%, at least 94%, at least 95%, at least 96%, at least 97%, at least 98%, at least 99%, or 100% identity to any one of SEQ ID NOS: 61-103. The polypeptide with phase behavior comprises a sequence with at least 80%, at least 81%, at least 82%, at least 83%, at least 84%, at least 85%, at least 86%, at least 87%, at least 88%, at least 89%, at least 90%, at least 91%, at least 92%, at least 93%, at least 94%, at least 95%, at least 96%, at least 97%, at least 98%, at least 99%, or 100% identity to a polypeptide of any one of SEQ ID NOS: 1-60 or 217. The fusion protein comprising the NBP and polypeptide with phase behavior is expressed according to standard protocols. Affinity of the fusion protein for a nucleic acid is assessed through capture experiments. The transition temperature of the fusion protein is determined using UV-Vis spectrophotometry.

### Example 2. Purification of Nucleic Acid Using Fusion Protein of Example 1

[0278] The fusion proteins of Example 1 are used to purify a target nucleic acid. The fusion protein is mixed with a sample containing the target nucleic acid and a contaminant. The fusion protein binds to the target nucleic acid. A first environmental factor is added to the composition to increase the size of the complex. TFF is used to separate the complex from the contaminants. A second environmental factor is added to a solution containing the purified complex to separate the fusion protein from the nucleic acid.

### Example 3. Comparison of ITC Generated Reagents Comprising Different Polypeptides with Phase Behavior for Non-Specific Binding

[0279] Purpose: This objective of this study was to identify the most effective polypeptide with phase behavior, for use in purifying single stranded nucleic acids.

[0280] Methods: This study evaluated the non-specific binding capabilities of different polypeptides with phase behavior alone to a variety of nucleic acids. Affinity of the polypeptide with phase behavior for a nucleic acid was assessed as described in Example 2. Nucleic acids were synthesized, mixed with different polypeptides with phase behavior, and then purified as described in Example 2 (e.g., using inverse transition cycling). The final concentrations of polypeptide with phase behavior, nucleic acid and salt within the capture reaction were 40 μM, 0.1 mg/ml, and 1.5M, respectively. Subsequently, 10 μl of capture reaction were loaded into the wells for the study. RNA templates of varying length and strandedness, in addition to linearized plasmid DNA, were tested for binding against four different polypeptides with phase behavior (20A80 (SEQ ID NO: 262), 50A80 (SEQ ID NO: 263), 100V80 (SEQ ID NO: 56), and 40L80 (SEQ ID NO: 264)). Capture reactions were loaded directly onto 1% native agarose gels such that successful binding of the nucleic acid species by the polypeptides with phase behavior would be indicated as retention within the well.

[0281] Results: Results are in FIG. 1. As shown, 20A80, 50A80 and 100V80 had little-to-no non-specific binding, while 40L80 exhibited non-specific binding to a broad range of nucleic acid species and was thus less effective for nucleic acid capture. Among the polypeptides with phase behavior, 100V80 also demonstrated the most optimal working temperatures for inverse transition cycling during production. Therefore, 100V80 was determined to be the most successful candidate polypeptide with phase behavior for the development of a fusion protein.

### Example 4. Effective Elution of Single Stranded RNA During an In Vitro Transcription Reaction Using a Reagent Comprising Bs-CspB and a Polypeptide with Phase Behavior

[0282] Purpose: This study sought to evaluate the purification of single stranded RNA (ssRNA) during in vitro transcription using a reagent comprising a fusion protein (SEQ ID NO: 225) containing the NBP Bs-CspB (SEQ ID NO: 90) and a polypeptide with phase behavior referred to as 100V80 (SEQ ID NO: 56).

[0283] Method: This experiment was performed using a shake-flask generated and inverse transition cycling (ITC) purified ssRNA purification reagent (referred to as “Isotag”). RNA capture reactions were then performed using the ssRNA purification reagent from in vitro transcription (IVT) reactions separately transcribing a range of mRNA template sizes including 1 kb, 4 kb, and 8 kb.

[0284] Direct IVT captures were performed using the ITC generated ssRNA purification reagent. To each IVT reaction, 50 μM of reagent was added to capture the desired ssRNA present in the reaction. The addition of NaCl to achieve a 1.5M final concentration permitted the phase separation necessary for size-based separation of the captured RNA within droplets from other IVT impurities using centrifugation at room temperature (RT). Following aspiration of the capture supernatant, water was used to disassociate the RNA from the droplets which were kept intact in the presence of heat. Another round of centrifugation separated the droplets from the final purified RNA. To determine nucleic acid concentration within the IVT reaction, lithium acetate precipitation and subsequent ethanol washes were used to precipitate and purify the RNA present in IVT reaction prior to resuspension in water. RNA concentration was calculated by assessing absorbance at 260 nm and 280 nm with a UV spectrometer and calculating concentration using the Beer-Lambert law. The percent elution of total RNA was then calculated for each mRNA template, including 1 kb, 4 kb and 8 kb. The percent elution reflected the final yield post-elution compared to the total RNA present in the initial IVT reaction.

[0285] Results: Results are in FIG. 2. In sum, the ssRNA purification reagent was able to obtain over 80% recovery of ssRNA during ITC reactions. These findings demonstrate the successful use of the fusion protein comprising Bs-CspB and the polypeptide with phase behavior 100V80 to effectively purify target ssRNA using size-based separation.

### Example 5. Highly Selective Capture of Purified RNA Using the ITC Generated Reagent of Example 4

[0286] Purpose: This study sought to evaluate the specificity by which the ITC generated reagent of Example 4 selectively captures target ssRNA by quantifying the separation of contaminants, exemplified by dsRNA.

[0287] Method: This study examined the capability of the ssRNA purification reagent of Example 3 to selectively capture purified RNA. For this study, separation of dsRNA from ssRNA was evaluated across a range of ssRNA purification reagent:RNA molar ratios.

[0288] To determine the Log 10 removal value (LRV) of dsRNA, the dsRNA concentrations in solution were assessed before and after purification with the ITC generated reagent. The RNA was generated with the HiScribe® T7 Quick High Yield RNA Synthesis Kit (NEB) and a linearized eGFP template bearing 5′ and 3′ UTRs with a 120-nucleotide poly A tail. IVT was carried out at 20° C. O/N to ensure sufficient generation of dsRNA. To test specificity for ssRNA with elevating impurities of dsRNA, ssRNA was generated via IVT utilizing the Hi-T7® RNA Polymerase (NEB) and subsequently enriched for ssRNA using cellulose based ssRNA purification while dsRNA matching the sequence and size of the ssRNA was also generated and purified as described in Baiersdorfer et al, Mol. Ther Nucleic Acids, 2019. UV-spectrometry was used to assess ssRNA concentrations while dsRNA concentrations were tested using a multi-species dsRNA ELISA kit (Novus Biologicals). Moreover, the percent elution of total dsRNA was evaluated among total RNA containing a range of percent spiked dsRNA including 0%, 0.01%, 0.1%, 1% and 10%.

[0289] Results: Results are shown in FIGS. 3A and 3B. In sum, the ssRNA purification reagent was highly selective for ssRNA. As shown in FIG. 3A, the resulting RNA captures of purified RNA with spiked in dsRNA demonstrated that across a range of ssRNA purification reagent:RNA molar ratios, the reagent retained selectivity for ssRNA and was capable of greater than 4-log removal of dsDNA. Moreover, FIG. 3B shows that despite spiking in dsRNA at values as high as 10% of the total RNA, selectivity was retained in captures performed on purified RNA. Regardless of the dsRNA content added, the percent eluted during the purification process remained less than 4%. These findings indicate that the reagent comprising Bs-CspB and 100V80 is both highly selective for the target nucleic acid and is able to separate the majority of contaminants from the final product.

### Example 6. Comparison of the Bs-CspB and 100V80 Reagent Versus Other Nucleic Binding Protein Reagents for Binding ssRNA and Other Sequences

[0290] Purpose: This study sought to evaluate the ability of the ITC generated reagent described in examples 4 and 5, comprising Bs-CspB and 100V80, to bind to a broad range of ssRNA templates and other sequences, and compare that ability to other ITC generated reagents comprising different nucleic binding proteins with 100V80.

[0291] Method: This study assessed nucleic acid capture of purified RNA using several different ITC generated reagents. A HiScribe T7 ARCA mRNA kit (NEB) was used to synthesize RNA from a PCR generated DNA template or linearized plasmid followed by post-IVT tailing for transcripts bearing a poly A tail. A 513 bp dsRNA was generated using a luciferase template following the method as described in Baiersdorfer et al, Mol Ther Nucleic Acids, 2019. RNA was purified by phenol-chloroform extraction followed by ethanol precipitation with ammonium acetate. The final RNA pellet was resuspended at 1 mg/ml in ultrapure water. UV-Vis spectrometry and gel electrophoresis were used to confirm purity and length of the mRNA transcript. The final concentrations of biopolymer, RNA and salt within the capture reaction were 40 μM, 0.1 mg/ml, and 1.5M, respectively. Capture supernatant was aspirated following centrifugation for 5 min at 5000 g. Successful capture was assessed by gel electrophoresis of samples loaded separately onto a 1% native agarose gel supplemented with 1× Sybr Safe DNA Gel Stain.

[0292] The ssRNA binding candidates, consisting of various nucleic binding proteins coupled to 100V80, were screened for their ability to capture ssRNA and dsRNA targets in independent capture reactions. Agarose gel electrophoresis was used to test for the presence of nucleic acid species in the capture supernatant. The presence of a band on the gels indicates uncaptured nucleic acids.

[0293] Results: Results are in FIG. 4. As shown, the Bs-CspB and 100V80 reagent is absent of any band for the ssRNA templates, and demonstrates a large amount of dsRNA that remained uncaptured. Overall, the Bs-CspB reagent demonstrates remarkable capture of a broad range of ssRNA species while not retaining dsRNA within the droplets. In sum, these findings demonstrate the successful use of a fusion protein comprising Bs-CspB and 100V80 to purify single stranded nucleic acids.

### INCORPORATION BY REFERENCE

[0294] All references, articles, publications, patents, patent publications, and patent applications cited herein are incorporated by reference in their entireties for all purposes. However, mention of any reference, article, publication, patent, patent publication, and patent application cited herein is not, and should not be taken as, an acknowledgment or any form of suggestion that it constitutes valid prior art or form part of the common general knowledge in any country in the world. The following patent documents are incorporated by reference herein in their entireties for all purposes: International Patent Publication No. 2021/168270 and International Patent Publication No. 2022/178537.

1. A fusion protein comprising a Bacillus subtilis cold shock protein B (Bs-CspB) and a polypeptide with phase behavior.

2. The fusion protein of claim 1, wherein the Bs-CspB has an amino acid sequence with at least 95% identity to a polypeptide of SEQ ID NO: 90.

3. The fusion protein of claim 1, wherein the polypeptide with phase behavior comprises a P and G motif, comprising a plurality of proline residues and a plurality of glycine residues.

4. The fusion protein of claim 1, wherein the P and G motif comprises at least about 10% proline residues and at least about 20% glycine residues.

5. The fusion protein of claim 1, wherein the polypeptide with phase behavior comprises pentapeptide repeat having the sequence (Val-Pro-Gly-Xaa-Gly)n (SEQ ID NO: 217), or a randomized, scrambled analog thereof; wherein Xaa can be any amino acid except proline, wherein n is an integer from 1 to 360, inclusive of endpoints.

6. (canceled)

7. The fusion protein of claim 1, wherein the polypeptide with phase behavior comprises an amino acid sequence selected from:
a.
(SEQ ID NO: 1)
(GRGDSPY)ₙ;
b.
(SEQ ID NO: 2)
(GRGDSPH)ₙ;
c.
(SEQ ID NO: 3)
(GRGDSPV)ₙ;
d.
(SEQ ID NO: 4)
(GRGDSPYG)ₙ;
e.
(SEQ ID NO: 5)
(RPLGYDS)ₙ;
f.
(SEQ ID NO: 6)
(RPAGYDS)ₙ;
g.
(SEQ ID NO: 7)
(GRGDSYP)ₙ;
h.
(SEQ ID NO: 8)
(GRGDSPYQ)ₙ;
i.
(SEQ ID NO: 9)
(GRGNSPYG)ₙ;
j.
(SEQ ID NO: 10)
(GVGVP)ₙ;;
k.
(SEQ ID NO: 11)
(GVGVPGLGVPGVGVPGLGVPGVGVP)ₘ;
l.
(SEQ ID NO: 12)
(GVGVPGVGVPGAGVPGVGVPGVGVP)ₘ;
m.
(SEQ ID NO: 13)
(GVGVPGWGVPGVGVPGWGVPGVGVP)ₘ;
n.
(SEQ ID NO: 14)
(GVGVPGVGVPGVGVPGVGVPGVGVPGVGVPGEGVPGFGVPGVGVP)ₘ;
o.
(SEQ ID NO: 15)
(GVGVPGVGVPGVGVPGVGVPGVGVPGVGVPGKGVPGFGVPGVGVP)ₘ;
and
p.
(SEQ ID NO: 16)
(GAGVPGVGVPGAGVPGVGVPGAGVP)ₘ;
wherein:
n is an integer in the range of 20-360, inclusive of endpoints; and
m is an integer in the range of 4-25, inclusive of endpoints.

8. The fusion protein of claim 1, wherein the polypeptide with phase behavior comprises an amino acid sequence selected from:
a.
(SEQ ID NO: 22)
(GVGVP)ₘ;
b.
(SEQ ID NO: 23)
(ZZPXXXXGZ)ₘ;
c.
(SEQ ID NO: 24)
(ZZPXGZ)ₘ;
d.
(SEQ ID NO: 25)
(ZZPXXGZ)ₘ;
or
e.
(SEQ ID NO: 26)
(ZZPXXXGZ)ₘ,
wherein m is an integer between 10 and 160, inclusive of endpoints, wherein X if present is any amino acid except proline or glycine, and wherein Z if present is any amino acid.

9. The fusion protein of claim 1, wherein the polypeptide with
phase behavior comprises an amino acid sequence selected from:
a.
(SEQ ID NO: 17)
(GVGVPGVGVPGAGVPGVGVPGVGVP)ₘ;
or
b.
(SEQ ID NO: 18)
(GVGVPGVGVPGLGVPGVGVPGVGVP)ₘ;
wherein m is an integer between 2 and 32, inclusive of endpoints.

10. The fusion protein of claim 1, wherein the polypeptide with phase behavior comprises an amino acid sequence selected from:
a. (GVGVPGVGVPGAGVPGVGVPGVGVP)ₘ (SEQ ID NO: 19), wherein m is 8 or 16;
b. (GVGVPGAGVP)ₘ (SEQ ID NO: 20), wherein m is an integer between 5 and 80, inclusive of endpoints; or
c. (GXGVP)ₘ (SEQ ID NO: 21), wherein m is an integer between 10 and 160, inclusive of endpoints, and wherein X for each repeat is independently selected from the group consisting of glycine, alanine, valine, isoleucine, leucine, phenylalanine, tyrosine, tryptophan, lysine, arginine, aspartic acid, glutamic acid, and serine.

11. The fusion protein of claim 1, wherein the polypeptide with phase behavior has identity to a polypeptide of any one of SEQ ID NOS: 1-60, 217, or 262-264.

12. (canceled)

13. The fusion protein of claim 1, wherein the polypeptide with phase behavior has at least 95% identity to a polypeptide of SEQ ID NO: 56.

14. The fusion protein of claim 1, wherein the fusion protein has at least 95% identity to a polypeptide of SEQ ID NO: 90 and at least 95% identity to a polypeptide of any one of SEQ ID NOs: 56 and 262-264.

15. The fusion protein of claim 1, wherein the fusion protein has at least 95% identity to a polypeptide of SEQ ID NO: 90 and at least 95% identity to a polypeptide of SEQ ID NO: 56.

16. The fusion protein of claim 1, comprising a linker.

17. The fusion protein of claim 16, wherein the linker has an amino acid sequence with at least 95% identity to a polypeptide of any one of SEQ ID NOS: 143-216, or 261.

18. (canceled)

19. The fusion protein of claim 1, wherein the fusion protein has an amino acid sequence with at least 95% identity to a polypeptide of any one of SEQ ID NOs: 225 or 226.

20. The fusion protein of claim 1, wherein the fusion protein has at least 95% identity to a polypeptide of SEQ ID NO: 225 or 226.

21. The fusion protein of claim 1, wherein the Bs-CspB binds to RNA, DNA, or both.

22. (canceled)

23. (canceled)

24. (canceled)

25. (canceled)

26. (canceled)

27. (canceled)

28. The fusion protein of claim 1, wherein the Bs-CspB binds to single stranded DNA, double stranded DNA, polyadenosine (polyA) DNA, Z-conformation DNA (Z-DNA), or a combination thereof.

29. A nucleic acid encoding the fusion protein of claim 1.

30. (canceled)

31. A vector encoding a fusion protein of claim 1.

32. (canceled)

33. (canceled)

34. A method of purifying a single stranded nucleic acid comprising:
(i) contacting a composition comprising the single stranded nucleic acid and at least one contaminant with a fusion protein of claim 1, wherein the fusion protein binds to the single stranded nucleic acid to form a complex;
(ii) adding to the composition comprising the complex a first environmental factor, thereby increasing the size of the complex;
(iii) separating the complex from at least one contaminant; and
(iv) separating the single stranded nucleic acid from the fusion protein by contacting the complex with a second environmental factor, thereby forming a product comprising the single stranded nucleic acid.

35-53. (canceled)

The application's sequence listing, which the Patent Office published only in electronic form, follows.

SEQUENCE LISTING (264 sequences)

SEQ ID NO: 1 - protein, 3500 aa, synthetic construct
  REPEAT 1..7: note = single repeat of (GRGDSPY)n, wherein n is an integer in the range of 1-500
  VARIANT 8..3500: note = up to 499 copies of (GRGDSPY) can be deleted
GRGDSPYGRGDSPYGRGDSPYGRGDSPYGRGDSPYGRGDSPYGRGDSPYGRGDSPYGRGDSPYGRGDSPYGRGDSPYGRGDSPYGRGDSPYGRGDSPYGRGDSPYGRGDSPYGRGDSPYGRGDSPYGRGDSPYGRGDSPYGRGDSPYGRGDSPYGRGDSPYGRGDSPYGRGDSPYGRGDSPYGRGDSPYGRGDSPYGRGDSPYGRGDSPYGRGDSPYGRGDSPYGRGDSPYGRGDSPYGRGDSPYGRGDSPYGRGDSPYGRGDSPYGRGDSPYGRGDSPYGRGDSPYGRGDSPYGRGDSPYGRGDSPYGRGDSPYGRGDSPYGRGDSPYGRGDSPYGRGDSPYGRGDSPYGRGDSPYGRGDSPYGRGDSPYGRGDSPYGRGDSPYGRGDSPYGRGDSPYGRGDSPYGRGDSPYGRGDSPYGRGDSPYGRGDSPYGRGDSPYGRGDSPYGRGDSPYGRGDSPYGRGDSPYGRGDSPYGRGDSPYGRGDSPYGRGDSPYGRGDSPYGRGDSPYGRGDSPYGRGDSPYGRGDSPYGRGDSPYGRGDSPYGRGDSPYGRGDSPYGRGDSPYGRGDSPYGRGDSPYGRGDSPYGRGDSPYGRGDSPYGRGDSPYGRGDSPYGRGDSPYGRGDSPYGRGDSPYGRGDSPYGRGDSPYGRGDSPYGRGDSPYGRGDSPYGRGDSPYGRGDSPYGRGDSPYGRGDSPYGRGDSPYGRGDSPYGRGDSPYGRGDSPYGRGDSPYGRGDSPYGRGDSPYGRGDSPYGRGDSPYGRGDSPYGRGDSPYGRGDSPYGRGDSPYGRGDSPYGRGDSPYGRGDSPYGRGDSPYGRGDSPYGRGDSPYGRGDSPYGRGDSPYGRGDSPYGRGDSPYGRGDSPYGRGDSPYGRGDSPYGRGDSPYGRGDSPYGRGDSPYGRGDSPYGRGDSPYGRGDSPYGRGDSPYGRGDSPYGRGDSPYGRGDSPYGRGDSPYGRGDSPYGRGDSPYGRGDSPYGRGDSPYGRGDSPYGRGDSPYGRGDSPYGRGDSPYGRGDSPYGRGDSPYGRGDSPYGRGDSPYGRGDSPYGRGDSPYGRGDSPYGRGDSPYGRGDSPYGRGDSPYGRGDSPYGRGDSPYGRGDSPYGRGDSPYGRGDSPYGRGDSPYGRGDSPYGRGDSPYGRGDSPYGRGDSPYGRGDSPYGRGDSPYGRGDSPYGRGDSPYGRGDSPYGRGDSPYGRGDSPYGRGDSPYGRGDSPYGRGDSPYGRGDSPYGRGDSPYGRGDSPYGRGDSPYGRGDSPYGRGDSPYGRGDSPYGRGDSPYGRGDSPYGRGDSPYGRGDSPYGRGDSPYGRGDSPYGRGDSPYGRGDSPYGRGDSPYGRGDSPYGRGDSPYGRGDSPYGRGDSPYGRGDSPYGRGDSPYGRGDSPYGRGDSPYGRGDSPYGRGDSPYGRGDSPYGRGDSPYGRGDSPYGRGDSPYGRGDSPYGRGDSPYGRGDSPYGRGDSPYGRGDSPYGRGDSPYGRGDSPYGRGDSPYGRGDSPYGRGDSPYGRGDSPYGRGDSPYGRGDSPYGRGDSPYGRGDSPYGRGDSPYGRGDSPYGRGDSPYGRGDSPYGRGDSPYGRGDSPYGRGDSPYGRGDSPYGRGDSPYGRGDSPYGRGDSPYGRGDSPYGRGDSPYGRGDSPYGRGDSPYGRGDSPYGRGDSPYGRGDSPYGRGDSPYGRGDSPYGRGDSPYGRGDSPYGRGDSPYGRGDSPYGRGDSPYGRGDSPYGRGDSPYGRGDSPYGRGDSPYGRGDSPYGRGDSPYGRGDSPYGRGDSPYGRGDSPYGRGDSPYGRGDSPYGRGDSPYGRGDSPYGRGDSPYGRGDSPYGRGDSPYGRGDSPYGRGDSPYGRGDSPYGRGDSPYGRGDSPYGRGDSPYGRGDSPYGRGDSPYGRGDSPYGRGDSPYGRGDSPYGRGDSPYGRGDSPYGRGDSPYGRGDSPYGRGDSPYGRGDSPYGRGDSPYGRGDSPYGRGDSPYGRGDSPYGRGDSPYGRGDSPYGRGDSPYGRGDSPYGRGDSPYGRGDSPYGRGDSPYGRGDSPYGRGDSPYGRGDSPYGRGDSPYGRGDSPYGRGDSPYGRGDSPYGRGDSPYGRGDSPYGRGDSPYGRGDSPYGRGDSPYGRGDSPYGRGDSPYGRGDSPYGRGDSPYGRGDSPYGRGDSPYGRGDSPYGRGDSPYGRGDSPYGRGDSPYGRGDSPYGRGDSPYGRGDSPYGRGDSPYGRGDSPYGRGDSPYGRGDSPYGRGDSPYGRGDSPYGRGDSPYGRGDSPYGRGDSPYGRGDSPYGRGDSPYGRGDSPYGRGDSPYGRGDSPYGRGDSPYGRGDSPYGRGDSPYGRGDSPYGRGDSPYGRGDSPYGRGDSPYGRGDSPYGRGDSPYGRGDSPYGRGDSPYGRGDSPYGRGDSPYGRGDSPYGRGDSPYGRGDSPYGRGDSPYGRGDSPYGRGDSPYGRGDSPYGRGDSPYGRGDSPYGRGDSPYGRGDSPYGRGDSPYGRGDSPYGRGDSPYGRGDSPYGRGDSPYGRGDSPYGRGDSPYGRGDSPYGRGDSPYGRGDSPYGRGDSPYGRGDSPYGRGDSPYGRGDSPYGRGDSPYGRGDSPYGRGDSPYGRGDSPYGRGDSPYGRGDSPYGRGDSPYGRGDSPYGRGDSPYGRGDSPYGRGDSPYGRGDSPYGRGDSPYGRGDSPYGRGDSPYGRGDSPYGRGDSPYGRGDSPYGRGDSPYGRGDSPYGRGDSPYGRGDSPYGRGDSPYGRGDSPYGRGDSPYGRGDSPYGRGDSPYGRGDSPYGRGDSPYGRGDSPYGRGDSPYGRGDSPYGRGDSPYGRGDSPYGRGDSPYGRGDSPYGRGDSPYGRGDSPYGRGDSPYGRGDSPYGRGDSPYGRGDSPYGRGDSPYGRGDSPYGRGDSPYGRGDSPYGRGDSPYGRGDSPYGRGDSPYGRGDSPYGRGDSPYGRGDSPYGRGDSPYGRGDSPYGRGDSPYGRGDSPYGRGDSPYGRGDSPYGRGDSPYGRGDSPYGRGDSPYGRGDSPYGRGDSPYGRGDSPYGRGDSPYGRGDSPYGRGDSPYGRGDSPYGRGDSPYGRGDSPYGRGDSPYGRGDSPYGRGDSPYGRGDSPYGRGDSPYGRGDSPYGRGDSPYGRGDSPYGRGDSPYGRGDSPYGRGDSPYGRGDSPYGRGDSPYGRGDSPYGRGDSPYGRGDSPYGRGDSPYGRGDSPYGRGDSPYGRGDSPYGRGDSPYGRGDSPYGRGDSPYGRGDSPYGRGDSPYGRGDSPYGRGDSPYGRGDSPYGRGDSPYGRGDSPYGRGDSPYGRGDSPYGRGDSPYGRGDSPYGRGDSPYGRGDSPYGRGDSPYGRGDSPYGRGDSPYGRGDSPYGRGDSPYGRGDSPYGRGDSPYGRGDSPYGRGDSPYGRGDSPYGRGDSPYGRGDSPYGRGDSPYGRGDSPYGRGDSPYGRGDSPYGRGDSPYGRGDSPYGRGDSPYGRGDSPYGRGDSPYGRGDSPYGRGDSPYGRGDSPYGRGDSPYGRGDSPYGRGDSPYGRGDSPY

SEQ ID NO: 2 - protein, 3500 aa, synthetic construct
  REPEAT 1..7: note = single repeat of (GRGDSPH)n, wherein n is an integer in the range of 1-500
  VARIANT 8..3500: note = up to 499 copies of (GRGDSPH) can be deleted
GRGDSPHGRGDSPHGRGDSPHGRGDSPHGRGDSPHGRGDSPHGRGDSPHGRGDSPHGRGDSPHGRGDSPHGRGDSPHGRGDSPHGRGDSPHGRGDSPHGRGDSPHGRGDSPHGRGDSPHGRGDSPHGRGDSPHGRGDSPHGRGDSPHGRGDSPHGRGDSPHGRGDSPHGRGDSPHGRGDSPHGRGDSPHGRGDSPHGRGDSPHGRGDSPHGRGDSPHGRGDSPHGRGDSPHGRGDSPHGRGDSPHGRGDSPHGRGDSPHGRGDSPHGRGDSPHGRGDSPHGRGDSPHGRGDSPHGRGDSPHGRGDSPHGRGDSPHGRGDSPHGRGDSPHGRGDSPHGRGDSPHGRGDSPHGRGDSPHGRGDSPHGRGDSPHGRGDSPHGRGDSPHGRGDSPHGRGDSPHGRGDSPHGRGDSPHGRGDSPHGRGDSPHGRGDSPHGRGDSPHGRGDSPHGRGDSPHGRGDSPHGRGDSPHGRGDSPHGRGDSPHGRGDSPHGRGDSPHGRGDSPHGRGDSPHGRGDSPHGRGDSPHGRGDSPHGRGDSPHGRGDSPHGRGDSPHGRGDSPHGRGDSPHGRGDSPHGRGDSPHGRGDSPHGRGDSPHGRGDSPHGRGDSPHGRGDSPHGRGDSPHGRGDSPHGRGDSPHGRGDSPHGRGDSPHGRGDSPHGRGDSPHGRGDSPHGRGDSPHGRGDSPHGRGDSPHGRGDSPHGRGDSPHGRGDSPHGRGDSPHGRGDSPHGRGDSPHGRGDSPHGRGDSPHGRGDSPHGRGDSPHGRGDSPHGRGDSPHGRGDSPHGRGDSPHGRGDSPHGRGDSPHGRGDSPHGRGDSPHGRGDSPHGRGDSPHGRGDSPHGRGDSPHGRGDSPHGRGDSPHGRGDSPHGRGDSPHGRGDSPHGRGDSPHGRGDSPHGRGDSPHGRGDSPHGRGDSPHGRGDSPHGRGDSPHGRGDSPHGRGDSPHGRGDSPHGRGDSPHGRGDSPHGRGDSPHGRGDSPHGRGDSPHGRGDSPHGRGDSPHGRGDSPHGRGDSPHGRGDSPHGRGDSPHGRGDSPHGRGDSPHGRGDSPHGRGDSPHGRGDSPHGRGDSPHGRGDSPHGRGDSPHGRGDSPHGRGDSPHGRGDSPHGRGDSPHGRGDSPHGRGDSPHGRGDSPHGRGDSPHGRGDSPHGRGDSPHGRGDSPHGRGDSPHGRGDSPHGRGDSPHGRGDSPHGRGDSPHGRGDSPHGRGDSPHGRGDSPHGRGDSPHGRGDSPHGRGDSPHGRGDSPHGRGDSPHGRGDSPHGRGDSPHGRGDSPHGRGDSPHGRGDSPHGRGDSPHGRGDSPHGRGDSPHGRGDSPHGRGDSPHGRGDSPHGRGDSPHGRGDSPHGRGDSPHGRGDSPHGRGDSPHGRGDSPHGRGDSPHGRGDSPHGRGDSPHGRGDSPHGRGDSPHGRGDSPHGRGDSPHGRGDSPHGRGDSPHGRGDSPHGRGDSPHGRGDSPHGRGDSPHGRGDSPHGRGDSPHGRGDSPHGRGDSPHGRGDSPHGRGDSPHGRGDSPHGRGDSPHGRGDSPHGRGDSPHGRGDSPHGRGDSPHGRGDSPHGRGDSPHGRGDSPHGRGDSPHGRGDSPHGRGDSPHGRGDSPHGRGDSPHGRGDSPHGRGDSPHGRGDSPHGRGDSPHGRGDSPHGRGDSPHGRGDSPHGRGDSPHGRGDSPHGRGDSPHGRGDSPHGRGDSPHGRGDSPHGRGDSPHGRGDSPHGRGDSPHGRGDSPHGRGDSPHGRGDSPHGRGDSPHGRGDSPHGRGDSPHGRGDSPHGRGDSPHGRGDSPHGRGDSPHGRGDSPHGRGDSPHGRGDSPHGRGDSPHGRGDSPHGRGDSPHGRGDSPHGRGDSPHGRGDSPHGRGDSPHGRGDSPHGRGDSPHGRGDSPHGRGDSPHGRGDSPHGRGDSPHGRGDSPHGRGDSPHGRGDSPHGRGDSPHGRGDSPHGRGDSPHGRGDSPHGRGDSPHGRGDSPHGRGDSPHGRGDSPHGRGDSPHGRGDSPHGRGDSPHGRGDSPHGRGDSPHGRGDSPHGRGDSPHGRGDSPHGRGDSPHGRGDSPHGRGDSPHGRGDSPHGRGDSPHGRGDSPHGRGDSPHGRGDSPHGRGDSPHGRGDSPHGRGDSPHGRGDSPHGRGDSPHGRGDSPHGRGDSPHGRGDSPHGRGDSPHGRGDSPHGRGDSPHGRGDSPHGRGDSPHGRGDSPHGRGDSPHGRGDSPHGRGDSPHGRGDSPHGRGDSPHGRGDSPHGRGDSPHGRGDSPHGRGDSPHGRGDSPHGRGDSPHGRGDSPHGRGDSPHGRGDSPHGRGDSPHGRGDSPHGRGDSPHGRGDSPHGRGDSPHGRGDSPHGRGDSPHGRGDSPHGRGDSPHGRGDSPHGRGDSPHGRGDSPHGRGDSPHGRGDSPHGRGDSPHGRGDSPHGRGDSPHGRGDSPHGRGDSPHGRGDSPHGRGDSPHGRGDSPHGRGDSPHGRGDSPHGRGDSPHGRGDSPHGRGDSPHGRGDSPHGRGDSPHGRGDSPHGRGDSPHGRGDSPHGRGDSPHGRGDSPHGRGDSPHGRGDSPHGRGDSPHGRGDSPHGRGDSPHGRGDSPHGRGDSPHGRGDSPHGRGDSPHGRGDSPHGRGDSPHGRGDSPHGRGDSPHGRGDSPHGRGDSPHGRGDSPHGRGDSPHGRGDSPHGRGDSPHGRGDSPHGRGDSPHGRGDSPHGRGDSPHGRGDSPHGRGDSPHGRGDSPHGRGDSPHGRGDSPHGRGDSPHGRGDSPHGRGDSPHGRGDSPHGRGDSPHGRGDSPHGRGDSPHGRGDSPHGRGDSPHGRGDSPHGRGDSPHGRGDSPHGRGDSPHGRGDSPHGRGDSPHGRGDSPHGRGDSPHGRGDSPHGRGDSPHGRGDSPHGRGDSPHGRGDSPHGRGDSPHGRGDSPHGRGDSPHGRGDSPHGRGDSPHGRGDSPHGRGDSPHGRGDSPHGRGDSPHGRGDSPHGRGDSPHGRGDSPHGRGDSPHGRGDSPHGRGDSPHGRGDSPHGRGDSPHGRGDSPHGRGDSPHGRGDSPHGRGDSPHGRGDSPHGRGDSPHGRGDSPHGRGDSPHGRGDSPHGRGDSPHGRGDSPHGRGDSPHGRGDSPHGRGDSPHGRGDSPHGRGDSPHGRGDSPHGRGDSPHGRGDSPHGRGDSPHGRGDSPHGRGDSPHGRGDSPHGRGDSPHGRGDSPHGRGDSPHGRGDSPHGRGDSPHGRGDSPHGRGDSPHGRGDSPHGRGDSPHGRGDSPHGRGDSPHGRGDSPHGRGDSPHGRGDSPHGRGDSPHGRGDSPHGRGDSPHGRGDSPHGRGDSPHGRGDSPHGRGDSPHGRGDSPHGRGDSPHGRGDSPHGRGDSPHGRGDSPHGRGDSPHGRGDSPHGRGDSPHGRGDSPHGRGDSPHGRGDSPHGRGDSPHGRGDSPHGRGDSPHGRGDSPHGRGDSPHGRGDSPHGRGDSPHGRGDSPHGRGDSPHGRGDSPHGRGDSPHGRGDSPHGRGDSPHGRGDSPHGRGDSPHGRGDSPHGRGDSPHGRGDSPH

SEQ ID NO: 3 - protein, 3500 aa, synthetic construct
  REPEAT 1..7: note = single repeat of (GRGDSPV)n, wherein n is an integer in the range of 1-500
  VARIANT 8..3500: note = up to 499 copies of (GRGDSPV) can be deleted
GRGDSPVGRGDSPVGRGDSPVGRGDSPVGRGDSPVGRGDSPVGRGDSPVGRGDSPVGRGDSPVGRGDSPVGRGDSPVGRGDSPVGRGDSPVGRGDSPVGRGDSPVGRGDSPVGRGDSPVGRGDSPVGRGDSPVGRGDSPVGRGDSPVGRGDSPVGRGDSPVGRGDSPVGRGDSPVGRGDSPVGRGDSPVGRGDSPVGRGDSPVGRGDSPVGRGDSPVGRGDSPVGRGDSPVGRGDSPVGRGDSPVGRGDSPVGRGDSPVGRGDSPVGRGDSPVGRGDSPVGRGDSPVGRGDSPVGRGDSPVGRGDSPVGRGDSPVGRGDSPVGRGDSPVGRGDSPVGRGDSPVGRGDSPVGRGDSPVGRGDSPVGRGDSPVGRGDSPVGRGDSPVGRGDSPVGRGDSPVGRGDSPVGRGDSPVGRGDSPVGRGDSPVGRGDSPVGRGDSPVGRGDSPVGRGDSPVGRGDSPVGRGDSPVGRGDSPVGRGDSPVGRGDSPVGRGDSPVGRGDSPVGRGDSPVGRGDSPVGRGDSPVGRGDSPVGRGDSPVGRGDSPVGRGDSPVGRGDSPVGRGDSPVGRGDSPVGRGDSPVGRGDSPVGRGDSPVGRGDSPVGRGDSPVGRGDSPVGRGDSPVGRGDSPVGRGDSPVGRGDSPVGRGDSPVGRGDSPVGRGDSPVGRGDSPVGRGDSPVGRGDSPVGRGDSPVGRGDSPVGRGDSPVGRGDSPVGRGDSPVGRGDSPVGRGDSPVGRGDSPVGRGDSPVGRGDSPVGRGDSPVGRGDSPVGRGDSPVGRGDSPVGRGDSPVGRGDSPVGRGDSPVGRGDSPVGRGDSPVGRGDSPVGRGDSPVGRGDSPVGRGDSPVGRGDSPVGRGDSPVGRGDSPVGRGDSPVGRGDSPVGRGDSPVGRGDSPVGRGDSPVGRGDSPVGRGDSPVGRGDSPVGRGDSPVGRGDSPVGRGDSPVGRGDSPVGRGDSPVGRGDSPVGRGDSPVGRGDSPVGRGDSPVGRGDSPVGRGDSPVGRGDSPVGRGDSPVGRGDSPVGRGDSPVGRGDSPVGRGDSPVGRGDSPVGRGDSPVGRGDSPVGRGDSPVGRGDSPVGRGDSPVGRGDSPVGRGDSPVGRGDSPVGRGDSPVGRGDSPVGRGDSPVGRGDSPVGRGDSPVGRGDSPVGRGDSPVGRGDSPVGRGDSPVGRGDSPVGRGDSPVGRGDSPVGRGDSPVGRGDSPVGRGDSPVGRGDSPVGRGDSPVGRGDSPVGRGDSPVGRGDSPVGRGDSPVGRGDSPVGRGDSPVGRGDSPVGRGDSPVGRGDSPVGRGDSPVGRGDSPVGRGDSPVGRGDSPVGRGDSPVGRGDSPVGRGDSPVGRGDSPVGRGDSPVGRGDSPVGRGDSPVGRGDSPVGRGDSPVGRGDSPVGRGDSPVGRGDSPVGRGDSPVGRGDSPVGRGDSPVGRGDSPVGRGDSPVGRGDSPVGRGDSPVGRGDSPVGRGDSPVGRGDSPVGRGDSPVGRGDSPVGRGDSPVGRGDSPVGRGDSPVGRGDSPVGRGDSPVGRGDSPVGRGDSPVGRGDSPVGRGDSPVGRGDSPVGRGDSPVGRGDSPVGRGDSPVGRGDSPVGRGDSPVGRGDSPVGRGDSPVGRGDSPVGRGDSPVGRGDSPVGRGDSPVGRGDSPVGRGDSPVGRGDSPVGRGDSPVGRGDSPVGRGDSPVGRGDSPVGRGDSPVGRGDSPVGRGDSPVGRGDSPVGRGDSPVGRGDSPVGRGDSPVGRGDSPVGRGDSPVGRGDSPVGRGDSPVGRGDSPVGRGDSPVGRGDSPVGRGDSPVGRGDSPVGRGDSPVGRGDSPVGRGDSPVGRGDSPVGRGDSPVGRGDSPVGRGDSPVGRGDSPVGRGDSPVGRGDSPVGRGDSPVGRGDSPVGRGDSPVGRGDSPVGRGDSPVGRGDSPVGRGDSPVGRGDSPVGRGDSPVGRGDSPVGRGDSPVGRGDSPVGRGDSPVGRGDSPVGRGDSPVGRGDSPVGRGDSPVGRGDSPVGRGDSPVGRGDSPVGRGDSPVGRGDSPVGRGDSPVGRGDSPVGRGDSPVGRGDSPVGRGDSPVGRGDSPVGRGDSPVGRGDSPVGRGDSPVGRGDSPVGRGDSPVGRGDSPVGRGDSPVGRGDSPVGRGDSPVGRGDSPVGRGDSPVGRGDSPVGRGDSPVGRGDSPVGRGDSPVGRGDSPVGRGDSPVGRGDSPVGRGDSPVGRGDSPVGRGDSPVGRGDSPVGRGDSPVGRGDSPVGRGDSPVGRGDSPVGRGDSPVGRGDSPVGRGDSPVGRGDSPVGRGDSPVGRGDSPVGRGDSPVGRGDSPVGRGDSPVGRGDSPVGRGDSPVGRGDSPVGRGDSPVGRGDSPVGRGDSPVGRGDSPVGRGDSPVGRGDSPVGRGDSPVGRGDSPVGRGDSPVGRGDSPVGRGDSPVGRGDSPVGRGDSPVGRGDSPVGRGDSPVGRGDSPVGRGDSPVGRGDSPVGRGDSPVGRGDSPVGRGDSPVGRGDSPVGRGDSPVGRGDSPVGRGDSPVGRGDSPVGRGDSPVGRGDSPVGRGDSPVGRGDSPVGRGDSPVGRGDSPVGRGDSPVGRGDSPVGRGDSPVGRGDSPVGRGDSPVGRGDSPVGRGDSPVGRGDSPVGRGDSPVGRGDSPVGRGDSPVGRGDSPVGRGDSPVGRGDSPVGRGDSPVGRGDSPVGRGDSPVGRGDSPVGRGDSPVGRGDSPVGRGDSPVGRGDSPVGRGDSPVGRGDSPVGRGDSPVGRGDSPVGRGDSPVGRGDSPVGRGDSPVGRGDSPVGRGDSPVGRGDSPVGRGDSPVGRGDSPVGRGDSPVGRGDSPVGRGDSPVGRGDSPVGRGDSPVGRGDSPVGRGDSPVGRGDSPVGRGDSPVGRGDSPVGRGDSPVGRGDSPVGRGDSPVGRGDSPVGRGDSPVGRGDSPVGRGDSPVGRGDSPVGRGDSPVGRGDSPVGRGDSPVGRGDSPVGRGDSPVGRGDSPVGRGDSPVGRGDSPVGRGDSPVGRGDSPVGRGDSPVGRGDSPVGRGDSPVGRGDSPVGRGDSPVGRGDSPVGRGDSPVGRGDSPVGRGDSPVGRGDSPVGRGDSPVGRGDSPVGRGDSPVGRGDSPVGRGDSPVGRGDSPVGRGDSPVGRGDSPVGRGDSPVGRGDSPVGRGDSPVGRGDSPVGRGDSPVGRGDSPVGRGDSPVGRGDSPVGRGDSPVGRGDSPVGRGDSPVGRGDSPVGRGDSPVGRGDSPVGRGDSPVGRGDSPVGRGDSPVGRGDSPVGRGDSPVGRGDSPVGRGDSPVGRGDSPVGRGDSPVGRGDSPVGRGDSPVGRGDSPVGRGDSPVGRGDSPVGRGDSPVGRGDSPVGRGDSPVGRGDSPVGRGDSPVGRGDSPVGRGDSPVGRGDSPVGRGDSPVGRGDSPVGRGDSPVGRGDSPVGRGDSPVGRGDSPVGRGDSPVGRGDSPVGRGDSPVGRGDSPVGRGDSPVGRGDSPVGRGDSPVGRGDSPVGRGDSPVGRGDSPVGRGDSPVGRGDSPVGRGDSPVGRGDSPV

SEQ ID NO: 4 - protein, 4000 aa, synthetic construct
  REPEAT 1..8: note = single repeat of (GRGDSPYG)n, wherein n is an integer in the range of 1-500
  VARIANT 9..4000: note = up to 499 copies of (GRGDSPYG) can be deleted
GRGDSPYGGRGDSPYGGRGDSPYGGRGDSPYGGRGDSPYGGRGDSPYGGRGDSPYGGRGDSPYGGRGDSPYGGRGDSPYGGRGDSPYGGRGDSPYGGRGDSPYGGRGDSPYGGRGDSPYGGRGDSPYGGRGDSPYGGRGDSPYGGRGDSPYGGRGDSPYGGRGDSPYGGRGDSPYGGRGDSPYGGRGDSPYGGRGDSPYGGRGDSPYGGRGDSPYGGRGDSPYGGRGDSPYGGRGDSPYGGRGDSPYGGRGDSPYGGRGDSPYGGRGDSPYGGRGDSPYGGRGDSPYGGRGDSPYGGRGDSPYGGRGDSPYGGRGDSPYGGRGDSPYGGRGDSPYGGRGDSPYGGRGDSPYGGRGDSPYGGRGDSPYGGRGDSPYGGRGDSPYGGRGDSPYGGRGDSPYGGRGDSPYGGRGDSPYGGRGDSPYGGRGDSPYGGRGDSPYGGRGDSPYGGRGDSPYGGRGDSPYGGRGDSPYGGRGDSPYGGRGDSPYGGRGDSPYGGRGDSPYGGRGDSPYGGRGDSPYGGRGDSPYGGRGDSPYGGRGDSPYGGRGDSPYGGRGDSPYGGRGDSPYGGRGDSPYGGRGDSPYGGRGDSPYGGRGDSPYGGRGDSPYGGRGDSPYGGRGDSPYGGRGDSPYGGRGDSPYGGRGDSPYGGRGDSPYGGRGDSPYGGRGDSPYGGRGDSPYGGRGDSPYGGRGDSPYGGRGDSPYGGRGDSPYGGRGDSPYGGRGDSPYGGRGDSPYGGRGDSPYGGRGDSPYGGRGDSPYGGRGDSPYGGRGDSPYGGRGDSPYGGRGDSPYGGRGDSPYGGRGDSPYGGRGDSPYGGRGDSPYGGRGDSPYGGRGDSPYGGRGDSPYGGRGDSPYGGRGDSPYGGRGDSPYGGRGDSPYGGRGDSPYGGRGDSPYGGRGDSPYGGRGDSPYGGRGDSPYGGRGDSPYGGRGDSPYGGRGDSPYGGRGDSPYGGRGDSPYGGRGDSPYGGRGDSPYGGRGDSPYGGRGDSPYGGRGDSPYGGRGDSPYGGRGDSPYGGRGDSPYGGRGDSPYGGRGDSPYGGRGDSPYGGRGDSPYGGRGDSPYGGRGDSPYGGRGDSPYGGRGDSPYGGRGDSPYGGRGDSPYGGRGDSPYGGRGDSPYGGRGDSPYGGRGDSPYGGRGDSPYGGRGDSPYGGRGDSPYGGRGDSPYGGRGDSPYGGRGDSPYGGRGDSPYGGRGDSPYGGRGDSPYGGRGDSPYGGRGDSPYGGRGDSPYGGRGDSPYGGRGDSPYGGRGDSPYGGRGDSPYGGRGDSPYGGRGDSPYGGRGDSPYGGRGDSPYGGRGDSPYGGRGDSPYGGRGDSPYGGRGDSPYGGRGDSPYGGRGDSPYGGRGDSPYGGRGDSPYGGRGDSPYGGRGDSPYGGRGDSPYGGRGDSPYGGRGDSPYGGRGDSPYGGRGDSPYGGRGDSPYGGRGDSPYGGRGDSPYGGRGDSPYGGRGDSPYGGRGDSPYGGRGDSPYGGRGDSPYGGRGDSPYGGRGDSPYGGRGDSPYGGRGDSPYGGRGDSPYGGRGDSPYGGRGDSPYGGRGDSPYGGRGDSPYGGRGDSPYGGRGDSPYGGRGDSPYGGRGDSPYGGRGDSPYGGRGDSPYGGRGDSPYGGRGDSPYGGRGDSPYGGRGDSPYGGRGDSPYGGRGDSPYGGRGDSPYGGRGDSPYGGRGDSPYGGRGDSPYGGRGDSPYGGRGDSPYGGRGDSPYGGRGDSPYGGRGDSPYGGRGDSPYGGRGDSPYGGRGDSPYGGRGDSPYGGRGDSPYGGRGDSPYGGRGDSPYGGRGDSPYGGRGDSPYGGRGDSPYGGRGDSPYGGRGDSPYGGRGDSPYGGRGDSPYGGRGDSPYGGRGDSPYGGRGDSPYGGRGDSPYGGRGDSPYGGRGDSPYGGRGDSPYGGRGDSPYGGRGDSPYGGRGDSPYGGRGDSPYGGRGDSPYGGRGDSPYGGRGDSPYGGRGDSPYGGRGDSPYGGRGDSPYGGRGDSPYGGRGDSPYGGRGDSPYGGRGDSPYGGRGDSPYGGRGDSPYGGRGDSPYGGRGDSPYGGRGDSPYGGRGDSPYGGRGDSPYGGRGDSPYGGRGDSPYGGRGDSPYGGRGDSPYGGRGDSPYGGRGDSPYGGRGDSPYGGRGDSPYGGRGDSPYGGRGDSPYGGRGDSPYGGRGDSPYGGRGDSPYGGRGDSPYGGRGDSPYGGRGDSPYGGRGDSPYGGRGDSPYGGRGDSPYGGRGDSPYGGRGDSPYGGRGDSPYGGRGDSPYGGRGDSPYGGRGDSPYGGRGDSPYGGRGDSPYGGRGDSPYGGRGDSPYGGRGDSPYGGRGDSPYGGRGDSPYGGRGDSPYGGRGDSPYGGRGDSPYGGRGDSPYGGRGDSPYGGRGDSPYGGRGDSPYGGRGDSPYGGRGDSPYGGRGDSPYGGRGDSPYGGRGDSPYGGRGDSPYGGRGDSPYGGRGDSPYGGRGDSPYGGRGDSPYGGRGDSPYGGRGDSPYGGRGDSPYGGRGDSPYGGRGDSPYGGRGDSPYGGRGDSPYGGRGDSPYGGRGDSPYGGRGDSPYGGRGDSPYGGRGDSPYGGRGDSPYGGRGDSPYGGRGDSPYGGRGDSPYGGRGDSPYGGRGDSPYGGRGDSPYGGRGDSPYGGRGDSPYGGRGDSPYGGRGDSPYGGRGDSPYGGRGDSPYGGRGDSPYGGRGDSPYGGRGDSPYGGRGDSPYGGRGDSPYGGRGDSPYGGRGDSPYGGRGDSPYGGRGDSPYGGRGDSPYGGRGDSPYGGRGDSPYGGRGDSPYGGRGDSPYGGRGDSPYGGRGDSPYGGRGDSPYGGRGDSPYGGRGDSPYGGRGDSPYGGRGDSPYGGRGDSPYGGRGDSPYGGRGDSPYGGRGDSPYGGRGDSPYGGRGDSPYGGRGDSPYGGRGDSPYGGRGDSPYGGRGDSPYGGRGDSPYGGRGDSPYGGRGDSPYGGRGDSPYGGRGDSPYGGRGDSPYGGRGDSPYGGRGDSPYGGRGDSPYGGRGDSPYGGRGDSPYGGRGDSPYGGRGDSPYGGRGDSPYGGRGDSPYGGRGDSPYGGRGDSPYGGRGDSPYGGRGDSPYGGRGDSPYGGRGDSPYGGRGDSPYGGRGDSPYGGRGDSPYGGRGDSPYGGRGDSPYGGRGDSPYGGRGDSPYGGRGDSPYGGRGDSPYGGRGDSPYGGRGDSPYGGRGDSPYGGRGDSPYGGRGDSPYGGRGDSPYGGRGDSPYGGRGDSPYGGRGDSPYGGRGDSPYGGRGDSPYGGRGDSPYGGRGDSPYGGRGDSPYGGRGDSPYGGRGDSPYGGRGDSPYGGRGDSPYGGRGDSPYGGRGDSPYGGRGDSPYGGRGDSPYGGRGDSPYGGRGDSPYGGRGDSPYGGRGDSPYGGRGDSPYGGRGDSPYGGRGDSPYGGRGDSPYGGRGDSPYGGRGDSPYGGRGDSPYGGRGDSPYGGRGDSPYGGRGDSPYGGRGDSPYGGRGDSPYGGRGDSPYGGRGDSPYGGRGDSPYGGRGDSPYGGRGDSPYGGRGDSPYGGRGDSPYGGRGDSPYGGRGDSPYGGRGDSPYGGRGDSPYGGRGDSPYGGRGDSPYGGRGDSPYGGRGDSPYGGRGDSPYGGRGDSPYGGRGDSPYGGRGDSPYGGRGDSPYGGRGDSPYGGRGDSPYGGRGDSPYGGRGDSPYGGRGDSPYGGRGDSPYGGRGDSPYGGRGDSPYGGRGDSPYGGRGDSPYGGRGDSPYGGRGDSPYGGRGDSPYGGRGDSPYGGRGDSPYGGRGDSPYGGRGDSPYGGRGDSPYGGRGDSPYGGRGDSPYGGRGDSPYGGRGDSPYGGRGDSPYGGRGDSPYGGRGDSPYGGRGDSPYGGRGDSPYGGRGDSPYGGRGDSPYGGRGDSPYGGRGDSPYGGRGDSPYGGRGDSPYGGRGDSPYGGRGDSPYGGRGDSPYGGRGDSPYGGRGDSPYGGRGDSPYGGRGDSPYGGRGDSPYGGRGDSPYGGRGDSPYGGRGDSPYGGRGDSPYGGRGDSPYGGRGDSPYGGRGDSPYGGRGDSPYGGRGDSPYG

SEQ ID NO: 5 - protein, 3500 aa, synthetic construct
  REPEAT 1..7: note = single repeat of (RPLGYDS)n, wherein n is an integer in the range of 1-500
  VARIANT 8..3500: note = up to 499 copies of (RPLGYDS) can be deleted
RPLGYDSRPLGYDSRPLGYDSRPLGYDSRPLGYDSRPLGYDSRPLGYDSRPLGYDSRPLGYDSRPLGYDSRPLGYDSRPLGYDSRPLGYDSRPLGYDSRPLGYDSRPLGYDSRPLGYDSRPLGYDSRPLGYDSRPLGYDSRPLGYDSRPLGYDSRPLGYDSRPLGYDSRPLGYDSRPLGYDSRPLGYDSRPLGYDSRPLGYDSRPLGYDSRPLGYDSRPLGYDSRPLGYDSRPLGYDSRPLGYDSRPLGYDSRPLGYDSRPLGYDSRPLGYDSRPLGYDSRPLGYDSRPLGYDSRPLGYDSRPLGYDSRPLGYDSRPLGYDSRPLGYDSRPLGYDSRPLGYDSRPLGYDSRPLGYDSRPLGYDSRPLGYDSRPLGYDSRPLGYDSRPLGYDSRPLGYDSRPLGYDSRPLGYDSRPLGYDSRPLGYDSRPLGYDSRPLGYDSRPLGYDSRPLGYDSRPLGYDSRPLGYDSRPLGYDSRPLGYDSRPLGYDSRPLGYDSRPLGYDSRPLGYDSRPLGYDSRPLGYDSRPLGYDSRPLGYDSRPLGYDSRPLGYDSRPLGYDSRPLGYDSRPLGYDSRPLGYDSRPLGYDSRPLGYDSRPLGYDSRPLGYDSRPLGYDSRPLGYDSRPLGYDSRPLGYDSRPLGYDSRPLGYDSRPLGYDSRPLGYDSRPLGYDSRPLGYDSRPLGYDSRPLGYDSRPLGYDSRPLGYDSRPLGYDSRPLGYDSRPLGYDSRPLGYDSRPLGYDSRPLGYDSRPLGYDSRPLGYDSRPLGYDSRPLGYDSRPLGYDSRPLGYDSRPLGYDSRPLGYDSRPLGYDSRPLGYDSRPLGYDSRPLGYDSRPLGYDSRPLGYDSRPLGYDSRPLGYDSRPLGYDSRPLGYDSRPLGYDSRPLGYDSRPLGYDSRPLGYDSRPLGYDSRPLGYDSRPLGYDSRPLGYDSRPLGYDSRPLGYDSRPLGYDSRPLGYDSRPLGYDSRPLGYDSRPLGYDSRPLGYDSRPLGYDSRPLGYDSRPLGYDSRPLGYDSRPLGYDSRPLGYDSRPLGYDSRPLGYDSRPLGYDSRPLGYDSRPLGYDSRPLGYDSRPLGYDSRPLGYDSRPLGYDSRPLGYDSRPLGYDSRPLGYDSRPLGYDSRPLGYDSRPLGYDSRPLGYDSRPLGYDSRPLGYDSRPLGYDSRPLGYDSRPLGYDSRPLGYDSRPLGYDSRPLGYDSRPLGYDSRPLGYDSRPLGYDSRPLGYDSRPLGYDSRPLGYDSRPLGYDSRPLGYDSRPLGYDSRPLGYDSRPLGYDSRPLGYDSRPLGYDSRPLGYDSRPLGYDSRPLGYDSRPLGYDSRPLGYDSRPLGYDSRPLGYDSRPLGYDSRPLGYDSRPLGYDSRPLGYDSRPLGYDSRPLGYDSRPLGYDSRPLGYDSRPLGYDSRPLGYDSRPLGYDSRPLGYDSRPLGYDSRPLGYDSRPLGYDSRPLGYDSRPLGYDSRPLGYDSRPLGYDSRPLGYDSRPLGYDSRPLGYDSRPLGYDSRPLGYDSRPLGYDSRPLGYDSRPLGYDSRPLGYDSRPLGYDSRPLGYDSRPLGYDSRPLGYDSRPLGYDSRPLGYDSRPLGYDSRPLGYDSRPLGYDSRPLGYDSRPLGYDSRPLGYDSRPLGYDSRPLGYDSRPLGYDSRPLGYDSRPLGYDSRPLGYDSRPLGYDSRPLGYDSRPLGYDSRPLGYDSRPLGYDSRPLGYDSRPLGYDSRPLGYDSRPLGYDSRPLGYDSRPLGYDSRPLGYDSRPLGYDSRPLGYDSRPLGYDSRPLGYDSRPLGYDSRPLGYDSRPLGYDSRPLGYDSRPLGYDSRPLGYDSRPLGYDSRPLGYDSRPLGYDSRPLGYDSRPLGYDSRPLGYDSRPLGYDSRPLGYDSRPLGYDSRPLGYDSRPLGYDSRPLGYDSRPLGYDSRPLGYDSRPLGYDSRPLGYDSRPLGYDSRPLGYDSRPLGYDSRPLGYDSRPLGYDSRPLGYDSRPLGYDSRPLGYDSRPLGYDSRPLGYDSRPLGYDSRPLGYDSRPLGYDSRPLGYDSRPLGYDSRPLGYDSRPLGYDSRPLGYDSRPLGYDSRPLGYDSRPLGYDSRPLGYDSRPLGYDSRPLGYDSRPLGYDSRPLGYDSRPLGYDSRPLGYDSRPLGYDSRPLGYDSRPLGYDSRPLGYDSRPLGYDSRPLGYDSRPLGYDSRPLGYDSRPLGYDSRPLGYDSRPLGYDSRPLGYDSRPLGYDSRPLGYDSRPLGYDSRPLGYDSRPLGYDSRPLGYDSRPLGYDSRPLGYDSRPLGYDSRPLGYDSRPLGYDSRPLGYDSRPLGYDSRPLGYDSRPLGYDSRPLGYDSRPLGYDSRPLGYDSRPLGYDSRPLGYDSRPLGYDSRPLGYDSRPLGYDSRPLGYDSRPLGYDSRPLGYDSRPLGYDSRPLGYDSRPLGYDSRPLGYDSRPLGYDSRPLGYDSRPLGYDSRPLGYDSRPLGYDSRPLGYDSRPLGYDSRPLGYDSRPLGYDSRPLGYDSRPLGYDSRPLGYDSRPLGYDSRPLGYDSRPLGYDSRPLGYDSRPLGYDSRPLGYDSRPLGYDSRPLGYDSRPLGYDSRPLGYDSRPLGYDSRPLGYDSRPLGYDSRPLGYDSRPLGYDSRPLGYDSRPLGYDSRPLGYDSRPLGYDSRPLGYDSRPLGYDSRPLGYDSRPLGYDSRPLGYDSRPLGYDSRPLGYDSRPLGYDSRPLGYDSRPLGYDSRPLGYDSRPLGYDSRPLGYDSRPLGYDSRPLGYDSRPLGYDSRPLGYDSRPLGYDSRPLGYDSRPLGYDSRPLGYDSRPLGYDSRPLGYDSRPLGYDSRPLGYDSRPLGYDSRPLGYDSRPLGYDSRPLGYDSRPLGYDSRPLGYDSRPLGYDSRPLGYDSRPLGYDSRPLGYDSRPLGYDSRPLGYDSRPLGYDSRPLGYDSRPLGYDSRPLGYDSRPLGYDSRPLGYDSRPLGYDSRPLGYDSRPLGYDSRPLGYDSRPLGYDSRPLGYDSRPLGYDSRPLGYDSRPLGYDSRPLGYDSRPLGYDSRPLGYDSRPLGYDSRPLGYDSRPLGYDSRPLGYDSRPLGYDSRPLGYDSRPLGYDSRPLGYDSRPLGYDSRPLGYDSRPLGYDSRPLGYDSRPLGYDSRPLGYDSRPLGYDSRPLGYDSRPLGYDSRPLGYDSRPLGYDSRPLGYDSRPLGYDSRPLGYDSRPLGYDSRPLGYDSRPLGYDSRPLGYDSRPLGYDSRPLGYDSRPLGYDSRPLGYDSRPLGYDSRPLGYDSRPLGYDSRPLGYDSRPLGYDSRPLGYDSRPLGYDSRPLGYDSRPLGYDSRPLGYDSRPLGYDSRPLGYDSRPLGYDSRPLGYDSRPLGYDSRPLGYDSRPLGYDSRPLGYDSRPLGYDSRPLGYDSRPLGYDSRPLGYDSRPLGYDSRPLGYDSRPLGYDSRPLGYDSRPLGYDSRPLGYDSRPLGYDSRPLGYDSRPLGYDSRPLGYDSRPLGYDSRPLGYDSRPLGYDSRPLGYDSRPLGYDSRPLGYDSRPLGYDS

SEQ ID NO: 6 - protein, 3500 aa, synthetic construct
  REPEAT 1..7: note = single repeat of (RPAGYDS)n, wherein n is an integer in the range of 1-500
  VARIANT 8..3500: note = up to 499 copies of (RPAGYDS) can be deleted
RPAGYDSRPAGYDSRPAGYDSRPAGYDSRPAGYDSRPAGYDSRPAGYDSRPAGYDSRPAGYDSRPAGYDSRPAGYDSRPAGYDSRPAGYDSRPAGYDSRPAGYDSRPAGYDSRPAGYDSRPAGYDSRPAGYDSRPAGYDSRPAGYDSRPAGYDSRPAGYDSRPAGYDSRPAGYDSRPAGYDSRPAGYDSRPAGYDSRPAGYDSRPAGYDSRPAGYDSRPAGYDSRPAGYDSRPAGYDSRPAGYDSRPAGYDSRPAGYDSRPAGYDSRPAGYDSRPAGYDSRPAGYDSRPAGYDSRPAGYDSRPAGYDSRPAGYDSRPAGYDSRPAGYDSRPAGYDSRPAGYDSRPAGYDSRPAGYDSRPAGYDSRPAGYDSRPAGYDSRPAGYDSRPAGYDSRPAGYDSRPAGYDSRPAGYDSRPAGYDSRPAGYDSRPAGYDSRPAGYDSRPAGYDSRPAGYDSRPAGYDSRPAGYDSRPAGYDSRPAGYDSRPAGYDSRPAGYDSRPAGYDSRPAGYDSRPAGYDSRPAGYDSRPAGYDSRPAGYDSRPAGYDSRPAGYDSRPAGYDSRPAGYDSRPAGYDSRPAGYDSRPAGYDSRPAGYDSRPAGYDSRPAGYDSRPAGYDSRPAGYDSRPAGYDSRPAGYDSRPAGYDSRPAGYDSRPAGYDSRPAGYDSRPAGYDSRPAGYDSRPAGYDSRPAGYDSRPAGYDSRPAGYDSRPAGYDSRPAGYDSRPAGYDSRPAGYDSRPAGYDSRPAGYDSRPAGYDSRPAGYDSRPAGYDSRPAGYDSRPAGYDSRPAGYDSRPAGYDSRPAGYDSRPAGYDSRPAGYDSRPAGYDSRPAGYDSRPAGYDSRPAGYDSRPAGYDSRPAGYDSRPAGYDSRPAGYDSRPAGYDSRPAGYDSRPAGYDSRPAGYDSRPAGYDSRPAGYDSRPAGYDSRPAGYDSRPAGYDSRPAGYDSRPAGYDSRPAGYDSRPAGYDSRPAGYDSRPAGYDSRPAGYDSRPAGYDSRPAGYDSRPAGYDSRPAGYDSRPAGYDSRPAGYDSRPAGYDSRPAGYDSRPAGYDSRPAGYDSRPAGYDSRPAGYDSRPAGYDSRPAGYDSRPAGYDSRPAGYDSRPAGYDSRPAGYDSRPAGYDSRPAGYDSRPAGYDSRPAGYDSRPAGYDSRPAGYDSRPAGYDSRPAGYDSRPAGYDSRPAGYDSRPAGYDSRPAGYDSRPAGYDSRPAGYDSRPAGYDSRPAGYDSRPAGYDSRPAGYDSRPAGYDSRPAGYDSRPAGYDSRPAGYDSRPAGYDSRPAGYDSRPAGYDSRPAGYDSRPAGYDSRPAGYDSRPAGYDSRPAGYDSRPAGYDSRPAGYDSRPAGYDSRPAGYDSRPAGYDSRPAGYDSRPAGYDSRPAGYDSRPAGYDSRPAGYDSRPAGYDSRPAGYDSRPAGYDSRPAGYDSRPAGYDSRPAGYDSRPAGYDSRPAGYDSRPAGYDSRPAGYDSRPAGYDSRPAGYDSRPAGYDSRPAGYDSRPAGYDSRPAGYDSRPAGYDSRPAGYDSRPAGYDSRPAGYDSRPAGYDSRPAGYDSRPAGYDSRPAGYDSRPAGYDSRPAGYDSRPAGYDSRPAGYDSRPAGYDSRPAGYDSRPAGYDSRPAGYDSRPAGYDSRPAGYDSRPAGYDSRPAGYDSRPAGYDSRPAGYDSRPAGYDSRPAGYDSRPAGYDSRPAGYDSRPAGYDSRPAGYDSRPAGYDSRPAGYDSRPAGYDSRPAGYDSRPAGYDSRPAGYDSRPAGYDSRPAGYDSRPAGYDSRPAGYDSRPAGYDSRPAGYDSRPAGYDSRPAGYDSRPAGYDSRPAGYDSRPAGYDSRPAGYDSRPAGYDSRPAGYDSRPAGYDSRPAGYDSRPAGYDSRPAGYDSRPAGYDSRPAGYDSRPAGYDSRPAGYDSRPAGYDSRPAGYDSRPAGYDSRPAGYDSRPAGYDSRPAGYDSRPAGYDSRPAGYDSRPAGYDSRPAGYDSRPAGYDSRPAGYDSRPAGYDSRPAGYDSRPAGYDSRPAGYDSRPAGYDSRPAGYDSRPAGYDSRPAGYDSRPAGYDSRPAGYDSRPAGYDSRPAGYDSRPAGYDSRPAGYDSRPAGYDSRPAGYDSRPAGYDSRPAGYDSRPAGYDSRPAGYDSRPAGYDSRPAGYDSRPAGYDSRPAGYDSRPAGYDSRPAGYDSRPAGYDSRPAGYDSRPAGYDSRPAGYDSRPAGYDSRPAGYDSRPAGYDSRPAGYDSRPAGYDSRPAGYDSRPAGYDSRPAGYDSRPAGYDSRPAGYDSRPAGYDSRPAGYDSRPAGYDSRPAGYDSRPAGYDSRPAGYDSRPAGYDSRPAGYDSRPAGYDSRPAGYDSRPAGYDSRPAGYDSRPAGYDSRPAGYDSRPAGYDSRPAGYDSRPAGYDSRPAGYDSRPAGYDSRPAGYDSRPAGYDSRPAGYDSRPAGYDSRPAGYDSRPAGYDSRPAGYDSRPAGYDSRPAGYDSRPAGYDSRPAGYDSRPAGYDSRPAGYDSRPAGYDSRPAGYDSRPAGYDSRPAGYDSRPAGYDSRPAGYDSRPAGYDSRPAGYDSRPAGYDSRPAGYDSRPAGYDSRPAGYDSRPAGYDSRPAGYDSRPAGYDSRPAGYDSRPAGYDSRPAGYDSRPAGYDSRPAGYDSRPAGYDSRPAGYDSRPAGYDSRPAGYDSRPAGYDSRPAGYDSRPAGYDSRPAGYDSRPAGYDSRPAGYDSRPAGYDSRPAGYDSRPAGYDSRPAGYDSRPAGYDSRPAGYDSRPAGYDSRPAGYDSRPAGYDSRPAGYDSRPAGYDSRPAGYDSRPAGYDSRPAGYDSRPAGYDSRPAGYDSRPAGYDSRPAGYDSRPAGYDSRPAGYDSRPAGYDSRPAGYDSRPAGYDSRPAGYDSRPAGYDSRPAGYDSRPAGYDSRPAGYDSRPAGYDSRPAGYDSRPAGYDSRPAGYDSRPAGYDSRPAGYDSRPAGYDSRPAGYDSRPAGYDSRPAGYDSRPAGYDSRPAGYDSRPAGYDSRPAGYDSRPAGYDSRPAGYDSRPAGYDSRPAGYDSRPAGYDSRPAGYDSRPAGYDSRPAGYDSRPAGYDSRPAGYDSRPAGYDSRPAGYDSRPAGYDSRPAGYDSRPAGYDSRPAGYDSRPAGYDSRPAGYDSRPAGYDSRPAGYDSRPAGYDSRPAGYDSRPAGYDSRPAGYDSRPAGYDSRPAGYDSRPAGYDSRPAGYDSRPAGYDSRPAGYDSRPAGYDSRPAGYDSRPAGYDSRPAGYDSRPAGYDSRPAGYDSRPAGYDSRPAGYDSRPAGYDSRPAGYDSRPAGYDSRPAGYDSRPAGYDSRPAGYDSRPAGYDSRPAGYDSRPAGYDSRPAGYDSRPAGYDSRPAGYDSRPAGYDSRPAGYDSRPAGYDSRPAGYDSRPAGYDSRPAGYDSRPAGYDSRPAGYDSRPAGYDSRPAGYDSRPAGYDSRPAGYDSRPAGYDSRPAGYDSRPAGYDSRPAGYDSRPAGYDSRPAGYDSRPAGYDSRPAGYDSRPAGYDSRPAGYDSRPAGYDS

SEQ ID NO: 7 - protein, 3500 aa, synthetic construct
  REPEAT 1..7: note = single repeat of (GRGDSYP)n, wherein n is an integer in the range of 1-500
  VARIANT 8..3500: note = up to 499 copies of (GRGDSYP) can be deleted
GRGDSYPGRGDSYPGRGDSYPGRGDSYPGRGDSYPGRGDSYPGRGDSYPGRGDSYPGRGDSYPGRGDSYPGRGDSYPGRGDSYPGRGDSYPGRGDSYPGRGDSYPGRGDSYPGRGDSYPGRGDSYPGRGDSYPGRGDSYPGRGDSYPGRGDSYPGRGDSYPGRGDSYPGRGDSYPGRGDSYPGRGDSYPGRGDSYPGRGDSYPGRGDSYPGRGDSYPGRGDSYPGRGDSYPGRGDSYPGRGDSYPGRGDSYPGRGDSYPGRGDSYPGRGDSYPGRGDSYPGRGDSYPGRGDSYPGRGDSYPGRGDSYPGRGDSYPGRGDSYPGRGDSYPGRGDSYPGRGDSYPGRGDSYPGRGDSYPGRGDSYPGRGDSYPGRGDSYPGRGDSYPGRGDSYPGRGDSYPGRGDSYPGRGDSYPGRGDSYPGRGDSYPGRGDSYPGRGDSYPGRGDSYPGRGDSYPGRGDSYPGRGDSYPGRGDSYPGRGDSYPGRGDSYPGRGDSYPGRGDSYPGRGDSYPGRGDSYPGRGDSYPGRGDSYPGRGDSYPGRGDSYPGRGDSYPGRGDSYPGRGDSYPGRGDSYPGRGDSYPGRGDSYPGRGDSYPGRGDSYPGRGDSYPGRGDSYPGRGDSYPGRGDSYPGRGDSYPGRGDSYPGRGDSYPGRGDSYPGRGDSYPGRGDSYPGRGDSYPGRGDSYPGRGDSYPGRGDSYPGRGDSYPGRGDSYPGRGDSYPGRGDSYPGRGDSYPGRGDSYPGRGDSYPGRGDSYPGRGDSYPGRGDSYPGRGDSYPGRGDSYPGRGDSYPGRGDSYPGRGDSYPGRGDSYPGRGDSYPGRGDSYPGRGDSYPGRGDSYPGRGDSYPGRGDSYPGRGDSYPGRGDSYPGRGDSYPGRGDSYPGRGDSYPGRGDSYPGRGDSYPGRGDSYPGRGDSYPGRGDSYPGRGDSYPGRGDSYPGRGDSYPGRGDSYPGRGDSYPGRGDSYPGRGDSYPGRGDSYPGRGDSYPGRGDSYPGRGDSYPGRGDSYPGRGDSYPGRGDSYPGRGDSYPGRGDSYPGRGDSYPGRGDSYPGRGDSYPGRGDSYPGRGDSYPGRGDSYPGRGDSYPGRGDSYPGRGDSYPGRGDSYPGRGDSYPGRGDSYPGRGDSYPGRGDSYPGRGDSYPGRGDSYPGRGDSYPGRGDSYPGRGDSYPGRGDSYPGRGDSYPGRGDSYPGRGDSYPGRGDSYPGRGDSYPGRGDSYPGRGDSYPGRGDSYPGRGDSYPGRGDSYPGRGDSYPGRGDSYPGRGDSYPGRGDSYPGRGDSYPGRGDSYPGRGDSYPGRGDSYPGRGDSYPGRGDSYPGRGDSYPGRGDSYPGRGDSYPGRGDSYPGRGDSYPGRGDSYPGRGDSYPGRGDSYPGRGDSYPGRGDSYPGRGDSYPGRGDSYPGRGDSYPGRGDSYPGRGDSYPGRGDSYPGRGDSYPGRGDSYPGRGDSYPGRGDSYPGRGDSYPGRGDSYPGRGDSYPGRGDSYPGRGDSYPGRGDSYPGRGDSYPGRGDSYPGRGDSYPGRGDSYPGRGDSYPGRGDSYPGRGDSYPGRGDSYPGRGDSYPGRGDSYPGRGDSYPGRGDSYPGRGDSYPGRGDSYPGRGDSYPGRGDSYPGRGDSYPGRGDSYPGRGDSYPGRGDSYPGRGDSYPGRGDSYPGRGDSYPGRGDSYPGRGDSYPGRGDSYPGRGDSYPGRGDSYPGRGDSYPGRGDSYPGRGDSYPGRGDSYPGRGDSYPGRGDSYPGRGDSYPGRGDSYPGRGDSYPGRGDSYPGRGDSYPGRGDSYPGRGDSYPGRGDSYPGRGDSYPGRGDSYPGRGDSYPGRGDSYPGRGDSYPGRGDSYPGRGDSYPGRGDSYPGRGDSYPGRGDSYPGRGDSYPGRGDSYPGRGDSYPGRGDSYPGRGDSYPGRGDSYPGRGDSYPGRGDSYPGRGDSYPGRGDSYPGRGDSYPGRGDSYPGRGDSYPGRGDSYPGRGDSYPGRGDSYPGRGDSYPGRGDSYPGRGDSYPGRGDSYPGRGDSYPGRGDSYPGRGDSYPGRGDSYPGRGDSYPGRGDSYPGRGDSYPGRGDSYPGRGDSYPGRGDSYPGRGDSYPGRGDSYPGRGDSYPGRGDSYPGRGDSYPGRGDSYPGRGDSYPGRGDSYPGRGDSYPGRGDSYPGRGDSYPGRGDSYPGRGDSYPGRGDSYPGRGDSYPGRGDSYPGRGDSYPGRGDSYPGRGDSYPGRGDSYPGRGDSYPGRGDSYPGRGDSYPGRGDSYPGRGDSYPGRGDSYPGRGDSYPGRGDSYPGRGDSYPGRGDSYPGRGDSYPGRGDSYPGRGDSYPGRGDSYPGRGDSYPGRGDSYPGRGDSYPGRGDSYPGRGDSYPGRGDSYPGRGDSYPGRGDSYPGRGDSYPGRGDSYPGRGDSYPGRGDSYPGRGDSYPGRGDSYPGRGDSYPGRGDSYPGRGDSYPGRGDSYPGRGDSYPGRGDSYPGRGDSYPGRGDSYPGRGDSYPGRGDSYPGRGDSYPGRGDSYPGRGDSYPGRGDSYPGRGDSYPGRGDSYPGRGDSYPGRGDSYPGRGDSYPGRGDSYPGRGDSYPGRGDSYPGRGDSYPGRGDSYPGRGDSYPGRGDSYPGRGDSYPGRGDSYPGRGDSYPGRGDSYPGRGDSYPGRGDSYPGRGDSYPGRGDSYPGRGDSYPGRGDSYPGRGDSYPGRGDSYPGRGDSYPGRGDSYPGRGDSYPGRGDSYPGRGDSYPGRGDSYPGRGDSYPGRGDSYPGRGDSYPGRGDSYPGRGDSYPGRGDSYPGRGDSYPGRGDSYPGRGDSYPGRGDSYPGRGDSYPGRGDSYPGRGDSYPGRGDSYPGRGDSYPGRGDSYPGRGDSYPGRGDSYPGRGDSYPGRGDSYPGRGDSYPGRGDSYPGRGDSYPGRGDSYPGRGDSYPGRGDSYPGRGDSYPGRGDSYPGRGDSYPGRGDSYPGRGDSYPGRGDSYPGRGDSYPGRGDSYPGRGDSYPGRGDSYPGRGDSYPGRGDSYPGRGDSYPGRGDSYPGRGDSYPGRGDSYPGRGDSYPGRGDSYPGRGDSYPGRGDSYPGRGDSYPGRGDSYPGRGDSYPGRGDSYPGRGDSYPGRGDSYPGRGDSYPGRGDSYPGRGDSYPGRGDSYPGRGDSYPGRGDSYPGRGDSYPGRGDSYPGRGDSYPGRGDSYPGRGDSYPGRGDSYPGRGDSYPGRGDSYPGRGDSYPGRGDSYPGRGDSYPGRGDSYPGRGDSYPGRGDSYPGRGDSYPGRGDSYPGRGDSYPGRGDSYPGRGDSYPGRGDSYPGRGDSYPGRGDSYPGRGDSYPGRGDSYPGRGDSYPGRGDSYPGRGDSYPGRGDSYPGRGDSYPGRGDSYPGRGDSYPGRGDSYPGRGDSYPGRGDSYPGRGDSYPGRGDSYPGRGDSYPGRGDSYPGRGDSYPGRGDSYPGRGDSYPGRGDSYPGRGDSYPGRGDSYPGRGDSYPGRGDSYPGRGDSYPGRGDSYPGRGDSYPGRGDSYPGRGDSYPGRGDSYPGRGDSYPGRGDSYP

SEQ ID NO: 8 - protein, 4000 aa, synthetic construct
  REPEAT 1..8: note = single repeat of (GRGDSPYQ)n, wherein n is an integer in the range of 1-500
  VARIANT 9..4000: note = up to 499 copies of (GRGDSPYQ) can be deleted
GRGDSPYQGRGDSPYQGRGDSPYQGRGDSPYQGRGDSPYQGRGDSPYQGRGDSPYQGRGDSPYQGRGDSPYQGRGDSPYQGRGDSPYQGRGDSPYQGRGDSPYQGRGDSPYQGRGDSPYQGRGDSPYQGRGDSPYQGRGDSPYQGRGDSPYQGRGDSPYQGRGDSPYQGRGDSPYQGRGDSPYQGRGDSPYQGRGDSPYQGRGDSPYQGRGDSPYQGRGDSPYQGRGDSPYQGRGDSPYQGRGDSPYQGRGDSPYQGRGDSPYQGRGDSPYQGRGDSPYQGRGDSPYQGRGDSPYQGRGDSPYQGRGDSPYQGRGDSPYQGRGDSPYQGRGDSPYQGRGDSPYQGRGDSPYQGRGDSPYQGRGDSPYQGRGDSPYQGRGDSPYQGRGDSPYQGRGDSPYQGRGDSPYQGRGDSPYQGRGDSPYQGRGDSPYQGRGDSPYQGRGDSPYQGRGDSPYQGRGDSPYQGRGDSPYQGRGDSPYQGRGDSPYQGRGDSPYQGRGDSPYQGRGDSPYQGRGDSPYQGRGDSPYQGRGDSPYQGRGDSPYQGRGDSPYQGRGDSPYQGRGDSPYQGRGDSPYQGRGDSPYQGRGDSPYQGRGDSPYQGRGDSPYQGRGDSPYQGRGDSPYQGRGDSPYQGRGDSPYQGRGDSPYQGRGDSPYQGRGDSPYQGRGDSPYQGRGDSPYQGRGDSPYQGRGDSPYQGRGDSPYQGRGDSPYQGRGDSPYQGRGDSPYQGRGDSPYQGRGDSPYQGRGDSPYQGRGDSPYQGRGDSPYQGRGDSPYQGRGDSPYQGRGDSPYQGRGDSPYQGRGDSPYQGRGDSPYQGRGDSPYQGRGDSPYQGRGDSPYQGRGDSPYQGRGDSPYQGRGDSPYQGRGDSPYQGRGDSPYQGRGDSPYQGRGDSPYQGRGDSPYQGRGDSPYQGRGDSPYQGRGDSPYQGRGDSPYQGRGDSPYQGRGDSPYQGRGDSPYQGRGDSPYQGRGDSPYQGRGDSPYQGRGDSPYQGRGDSPYQGRGDSPYQGRGDSPYQGRGDSPYQGRGDSPYQGRGDSPYQGRGDSPYQGRGDSPYQGRGDSPYQGRGDSPYQGRGDSPYQGRGDSPYQGRGDSPYQGRGDSPYQGRGDSPYQGRGDSPYQGRGDSPYQGRGDSPYQGRGDSPYQGRGDSPYQGRGDSPYQGRGDSPYQGRGDSPYQGRGDSPYQGRGDSPYQGRGDSPYQGRGDSPYQGRGDSPYQGRGDSPYQGRGDSPYQGRGDSPYQGRGDSPYQGRGDSPYQGRGDSPYQGRGDSPYQGRGDSPYQGRGDSPYQGRGDSPYQGRGDSPYQGRGDSPYQGRGDSPYQGRGDSPYQGRGDSPYQGRGDSPYQGRGDSPYQGRGDSPYQGRGDSPYQGRGDSPYQGRGDSPYQGRGDSPYQGRGDSPYQGRGDSPYQGRGDSPYQGRGDSPYQGRGDSPYQGRGDSPYQGRGDSPYQGRGDSPYQGRGDSPYQGRGDSPYQGRGDSPYQGRGDSPYQGRGDSPYQGRGDSPYQGRGDSPYQGRGDSPYQGRGDSPYQGRGDSPYQGRGDSPYQGRGDSPYQGRGDSPYQGRGDSPYQGRGDSPYQGRGDSPYQGRGDSPYQGRGDSPYQGRGDSPYQGRGDSPYQGRGDSPYQGRGDSPYQGRGDSPYQGRGDSPYQGRGDSPYQGRGDSPYQGRGDSPYQGRGDSPYQGRGDSPYQGRGDSPYQGRGDSPYQGRGDSPYQGRGDSPYQGRGDSPYQGRGDSPYQGRGDSPYQGRGDSPYQGRGDSPYQGRGDSPYQGRGDSPYQGRGDSPYQGRGDSPYQGRGDSPYQGRGDSPYQGRGDSPYQGRGDSPYQGRGDSPYQGRGDSPYQGRGDSPYQGRGDSPYQGRGDSPYQGRGDSPYQGRGDSPYQGRGDSPYQGRGDSPYQGRGDSPYQGRGDSPYQGRGDSPYQGRGDSPYQGRGDSPYQGRGDSPYQGRGDSPYQGRGDSPYQGRGDSPYQGRGDSPYQGRGDSPYQGRGDSPYQGRGDSPYQGRGDSPYQGRGDSPYQGRGDSPYQGRGDSPYQGRGDSPYQGRGDSPYQGRGDSPYQGRGDSPYQGRGDSPYQGRGDSPYQGRGDSPYQGRGDSPYQGRGDSPYQGRGDSPYQGRGDSPYQGRGDSPYQGRGDSPYQGRGDSPYQGRGDSPYQGRGDSPYQGRGDSPYQGRGDSPYQGRGDSPYQGRGDSPYQGRGDSPYQGRGDSPYQGRGDSPYQGRGDSPYQGRGDSPYQGRGDSPYQGRGDSPYQGRGDSPYQGRGDSPYQGRGDSPYQGRGDSPYQGRGDSPYQGRGDSPYQGRGDSPYQGRGDSPYQGRGDSPYQGRGDSPYQGRGDSPYQGRGDSPYQGRGDSPYQGRGDSPYQGRGDSPYQGRGDSPYQGRGDSPYQGRGDSPYQGRGDSPYQGRGDSPYQGRGDSPYQGRGDSPYQGRGDSPYQGRGDSPYQGRGDSPYQGRGDSPYQGRGDSPYQGRGDSPYQGRGDSPYQGRGDSPYQGRGDSPYQGRGDSPYQGRGDSPYQGRGDSPYQGRGDSPYQGRGDSPYQGRGDSPYQGRGDSPYQGRGDSPYQGRGDSPYQGRGDSPYQGRGDSPYQGRGDSPYQGRGDSPYQGRGDSPYQGRGDSPYQGRGDSPYQGRGDSPYQGRGDSPYQGRGDSPYQGRGDSPYQGRGDSPYQGRGDSPYQGRGDSPYQGRGDSPYQGRGDSPYQGRGDSPYQGRGDSPYQGRGDSPYQGRGDSPYQGRGDSPYQGRGDSPYQGRGDSPYQGRGDSPYQGRGDSPYQGRGDSPYQGRGDSPYQGRGDSPYQGRGDSPYQGRGDSPYQGRGDSPYQGRGDSPYQGRGDSPYQGRGDSPYQGRGDSPYQGRGDSPYQGRGDSPYQGRGDSPYQGRGDSPYQGRGDSPYQGRGDSPYQGRGDSPYQGRGDSPYQGRGDSPYQGRGDSPYQGRGDSPYQGRGDSPYQGRGDSPYQGRGDSPYQGRGDSPYQGRGDSPYQGRGDSPYQGRGDSPYQGRGDSPYQGRGDSPYQGRGDSPYQGRGDSPYQGRGDSPYQGRGDSPYQGRGDSPYQGRGDSPYQGRGDSPYQGRGDSPYQGRGDSPYQGRGDSPYQGRGDSPYQGRGDSPYQGRGDSPYQGRGDSPYQGRGDSPYQGRGDSPYQGRGDSPYQGRGDSPYQGRGDSPYQGRGDSPYQGRGDSPYQGRGDSPYQGRGDSPYQGRGDSPYQGRGDSPYQGRGDSPYQGRGDSPYQGRGDSPYQGRGDSPYQGRGDSPYQGRGDSPYQGRGDSPYQGRGDSPYQGRGDSPYQGRGDSPYQGRGDSPYQGRGDSPYQGRGDSPYQGRGDSPYQGRGDSPYQGRGDSPYQGRGDSPYQGRGDSPYQGRGDSPYQGRGDSPYQGRGDSPYQGRGDSPYQGRGDSPYQGRGDSPYQGRGDSPYQGRGDSPYQGRGDSPYQGRGDSPYQGRGDSPYQGRGDSPYQGRGDSPYQGRGDSPYQGRGDSPYQGRGDSPYQGRGDSPYQGRGDSPYQGRGDSPYQGRGDSPYQGRGDSPYQGRGDSPYQGRGDSPYQGRGDSPYQGRGDSPYQGRGDSPYQGRGDSPYQGRGDSPYQGRGDSPYQGRGDSPYQGRGDSPYQGRGDSPYQGRGDSPYQGRGDSPYQGRGDSPYQGRGDSPYQGRGDSPYQGRGDSPYQGRGDSPYQGRGDSPYQGRGDSPYQGRGDSPYQGRGDSPYQGRGDSPYQGRGDSPYQGRGDSPYQGRGDSPYQGRGDSPYQGRGDSPYQGRGDSPYQGRGDSPYQGRGDSPYQGRGDSPYQGRGDSPYQGRGDSPYQGRGDSPYQGRGDSPYQGRGDSPYQGRGDSPYQGRGDSPYQGRGDSPYQGRGDSPYQGRGDSPYQGRGDSPYQGRGDSPYQGRGDSPYQGRGDSPYQGRGDSPYQGRGDSPYQGRGDSPYQGRGDSPYQGRGDSPYQGRGDSPYQGRGDSPYQGRGDSPYQGRGDSPYQGRGDSPYQGRGDSPYQGRGDSPYQGRGDSPYQGRGDSPYQ

SEQ ID NO: 9 - protein, 4000 aa, synthetic construct
  REPEAT 1..8: note = single repeat of (GRGNSPYG)n, wherein n is an integer in the range of 1-500
  VARIANT 9..4000: note = up to 499 copies of (GRGNSPYG) can be deleted
GRGNSPYGGRGNSPYGGRGNSPYGGRGNSPYGGRGNSPYGGRGNSPYGGRGNSPYGGRGNSPYGGRGNSPYGGRGNSPYGGRGNSPYGGRGNSPYGGRGNSPYGGRGNSPYGGRGNSPYGGRGNSPYGGRGNSPYGGRGNSPYGGRGNSPYGGRGNSPYGGRGNSPYGGRGNSPYGGRGNSPYGGRGNSPYGGRGNSPYGGRGNSPYGGRGNSPYGGRGNSPYGGRGNSPYGGRGNSPYGGRGNSPYGGRGNSPYGGRGNSPYGGRGNSPYGGRGNSPYGGRGNSPYGGRGNSPYGGRGNSPYGGRGNSPYGGRGNSPYGGRGNSPYGGRGNSPYGGRGNSPYGGRGNSPYGGRGNSPYGGRGNSPYGGRGNSPYGGRGNSPYGGRGNSPYGGRGNSPYGGRGNSPYGGRGNSPYGGRGNSPYGGRGNSPYGGRGNSPYGGRGNSPYGGRGNSPYGGRGNSPYGGRGNSPYGGRGNSPYGGRGNSPYGGRGNSPYGGRGNSPYGGRGNSPYGGRGNSPYGGRGNSPYGGRGNSPYGGRGNSPYGGRGNSPYGGRGNSPYGGRGNSPYGGRGNSPYGGRGNSPYGGRGNSPYGGRGNSPYGGRGNSPYGGRGNSPYGGRGNSPYGGRGNSPYGGRGNSPYGGRGNSPYGGRGNSPYGGRGNSPYGGRGNSPYGGRGNSPYGGRGNSPYGGRGNSPYGGRGNSPYGGRGNSPYGGRGNSPYGGRGNSPYGGRGNSPYGGRGNSPYGGRGNSPYGGRGNSPYGGRGNSPYGGRGNSPYGGRGNSPYGGRGNSPYGGRGNSPYGGRGNSPYGGRGNSPYGGRGNSPYGGRGNSPYGGRGNSPYGGRGNSPYGGRGNSPYGGRGNSPYGGRGNSPYGGRGNSPYGGRGNSPYGGRGNSPYGGRGNSPYGGRGNSPYGGRGNSPYGGRGNSPYGGRGNSPYGGRGNSPYGGRGNSPYGGRGNSPYGGRGNSPYGGRGNSPYGGRGNSPYGGRGNSPYGGRGNSPYGGRGNSPYGGRGNSPYGGRGNSPYGGRGNSPYGGRGNSPYGGRGNSPYGGRGNSPYGGRGNSPYGGRGNSPYGGRGNSPYGGRGNSPYGGRGNSPYGGRGNSPYGGRGNSPYGGRGNSPYGGRGNSPYGGRGNSPYGGRGNSPYGGRGNSPYGGRGNSPYGGRGNSPYGGRGNSPYGGRGNSPYGGRGNSPYGGRGNSPYGGRGNSPYGGRGNSPYGGRGNSPYGGRGNSPYGGRGNSPYGGRGNSPYGGRGNSPYGGRGNSPYGGRGNSPYGGRGNSPYGGRGNSPYGGRGNSPYGGRGNSPYGGRGNSPYGGRGNSPYGGRGNSPYGGRGNSPYGGRGNSPYGGRGNSPYGGRGNSPYGGRGNSPYGGRGNSPYGGRGNSPYGGRGNSPYGGRGNSPYGGRGNSPYGGRGNSPYGGRGNSPYGGRGNSPYGGRGNSPYGGRGNSPYGGRGNSPYGGRGNSPYGGRGNSPYGGRGNSPYGGRGNSPYGGRGNSPYGGRGNSPYGGRGNSPYGGRGNSPYGGRGNSPYGGRGNSPYGGRGNSPYGGRGNSPYGGRGNSPYGGRGNSPYGGRGNSPYGGRGNSPYGGRGNSPYGGRGNSPYGGRGNSPYGGRGNSPYGGRGNSPYGGRGNSPYGGRGNSPYGGRGNSPYGGRGNSPYGGRGNSPYGGRGNSPYGGRGNSPYGGRGNSPYGGRGNSPYGGRGNSPYGGRGNSPYGGRGNSPYGGRGNSPYGGRGNSPYGGRGNSPYGGRGNSPYGGRGNSPYGGRGNSPYGGRGNSPYGGRGNSPYGGRGNSPYGGRGNSPYGGRGNSPYGGRGNSPYGGRGNSPYGGRGNSPYGGRGNSPYGGRGNSPYGGRGNSPYGGRGNSPYGGRGNSPYGGRGNSPYGGRGNSPYGGRGNSPYGGRGNSPYGGRGNSPYGGRGNSPYGGRGNSPYGGRGNSPYGGRGNSPYGGRGNSPYGGRGNSPYGGRGNSPYGGRGNSPYGGRGNSPYGGRGNSPYGGRGNSPYGGRGNSPYGGRGNSPYGGRGNSPYGGRGNSPYGGRGNSPYGGRGNSPYGGRGNSPYGGRGNSPYGGRGNSPYGGRGNSPYGGRGNSPYGGRGNSPYGGRGNSPYGGRGNSPYGGRGNSPYGGRGNSPYGGRGNSPYGGRGNSPYGGRGNSPYGGRGNSPYGGRGNSPYGGRGNSPYGGRGNSPYGGRGNSPYGGRGNSPYGGRGNSPYGGRGNSPYGGRGNSPYGGRGNSPYGGRGNSPYGGRGNSPYGGRGNSPYGGRGNSPYGGRGNSPYGGRGNSPYGGRGNSPYGGRGNSPYGGRGNSPYGGRGNSPYGGRGNSPYGGRGNSPYGGRGNSPYGGRGNSPYGGRGNSPYGGRGNSPYGGRGNSPYGGRGNSPYGGRGNSPYGGRGNSPYGGRGNSPYGGRGNSPYGGRGNSPYGGRGNSPYGGRGNSPYGGRGNSPYGGRGNSPYGGRGNSPYGGRGNSPYGGRGNSPYGGRGNSPYGGRGNSPYGGRGNSPYGGRGNSPYGGRGNSPYGGRGNSPYGGRGNSPYGGRGNSPYGGRGNSPYGGRGNSPYGGRGNSPYGGRGNSPYGGRGNSPYGGRGNSPYGGRGNSPYGGRGNSPYGGRGNSPYGGRGNSPYGGRGNSPYGGRGNSPYGGRGNSPYGGRGNSPYGGRGNSPYGGRGNSPYGGRGNSPYGGRGNSPYGGRGNSPYGGRGNSPYGGRGNSPYGGRGNSPYGGRGNSPYGGRGNSPYGGRGNSPYGGRGNSPYGGRGNSPYGGRGNSPYGGRGNSPYGGRGNSPYGGRGNSPYGGRGNSPYGGRGNSPYGGRGNSPYGGRGNSPYGGRGNSPYGGRGNSPYGGRGNSPYGGRGNSPYGGRGNSPYGGRGNSPYGGRGNSPYGGRGNSPYGGRGNSPYGGRGNSPYGGRGNSPYGGRGNSPYGGRGNSPYGGRGNSPYGGRGNSPYGGRGNSPYGGRGNSPYGGRGNSPYGGRGNSPYGGRGNSPYGGRGNSPYGGRGNSPYGGRGNSPYGGRGNSPYGGRGNSPYGGRGNSPYGGRGNSPYGGRGNSPYGGRGNSPYGGRGNSPYGGRGNSPYGGRGNSPYGGRGNSPYGGRGNSPYGGRGNSPYGGRGNSPYGGRGNSPYGGRGNSPYGGRGNSPYGGRGNSPYGGRGNSPYGGRGNSPYGGRGNSPYGGRGNSPYGGRGNSPYGGRGNSPYGGRGNSPYGGRGNSPYGGRGNSPYGGRGNSPYGGRGNSPYGGRGNSPYGGRGNSPYGGRGNSPYGGRGNSPYGGRGNSPYGGRGNSPYGGRGNSPYGGRGNSPYGGRGNSPYGGRGNSPYGGRGNSPYGGRGNSPYGGRGNSPYGGRGNSPYGGRGNSPYGGRGNSPYGGRGNSPYGGRGNSPYGGRGNSPYGGRGNSPYGGRGNSPYGGRGNSPYGGRGNSPYGGRGNSPYGGRGNSPYGGRGNSPYGGRGNSPYGGRGNSPYGGRGNSPYGGRGNSPYGGRGNSPYGGRGNSPYGGRGNSPYGGRGNSPYGGRGNSPYGGRGNSPYGGRGNSPYGGRGNSPYGGRGNSPYGGRGNSPYGGRGNSPYGGRGNSPYGGRGNSPYGGRGNSPYGGRGNSPYGGRGNSPYGGRGNSPYGGRGNSPYGGRGNSPYGGRGNSPYGGRGNSPYGGRGNSPYGGRGNSPYGGRGNSPYGGRGNSPYGGRGNSPYGGRGNSPYGGRGNSPYGGRGNSPYGGRGNSPYGGRGNSPYGGRGNSPYGGRGNSPYGGRGNSPYGGRGNSPYGGRGNSPYGGRGNSPYGGRGNSPYGGRGNSPYGGRGNSPYGGRGNSPYGGRGNSPYGGRGNSPYGGRGNSPYGGRGNSPYGGRGNSPYGGRGNSPYGGRGNSPYGGRGNSPYGGRGNSPYGGRGNSPYGGRGNSPYGGRGNSPYGGRGNSPYGGRGNSPYGGRGNSPYGGRGNSPYGGRGNSPYGGRGNSPYGGRGNSPYGGRGNSPYGGRGNSPYGGRGNSPYGGRGNSPYGGRGNSPYGGRGNSPYGGRGNSPYG

SEQ ID NO: 10 - protein, 2500 aa, synthetic construct
  REPEAT 1..5: note = single repeat of (GVGVP)n, wherein n is an integer in the range of 1-500
  VARIANT 6..2500: note = up to 499 copies of (GVGVP) can be deleted
GVGVPGVGVPGVGVPGVGVPGVGVPGVGVPGVGVPGVGVPGVGVPGVGVPGVGVPGVGVPGVGVPGVGVPGVGVPGVGVPGVGVPGVGVPGVGVPGVGVPGVGVPGVGVPGVGVPGVGVPGVGVPGVGVPGVGVPGVGVPGVGVPGVGVPGVGVPGVGVPGVGVPGVGVPGVGVPGVGVPGVGVPGVGVPGVGVPGVGVPGVGVPGVGVPGVGVPGVGVPGVGVPGVGVPGVGVPGVGVPGVGVPGVGVPGVGVPGVGVPGVGVPGVGVPGVGVPGVGVPGVGVPGVGVPGVGVPGVGVPGVGVPGVGVPGVGVPGVGVPGVGVPGVGVPGVGVPGVGVPGVGVPGVGVPGVGVPGVGVPGVGVPGVGVPGVGVPGVGVPGVGVPGVGVPGVGVPGVGVPGVGVPGVGVPGVGVPGVGVPGVGVPGVGVPGVGVPGVGVPGVGVPGVGVPGVGVPGVGVPGVGVPGVGVPGVGVPGVGVPGVGVPGVGVPGVGVPGVGVPGVGVPGVGVPGVGVPGVGVPGVGVPGVGVPGVGVPGVGVPGVGVPGVGVPGVGVPGVGVPGVGVPGVGVPGVGVPGVGVPGVGVPGVGVPGVGVPGVGVPGVGVPGVGVPGVGVPGVGVPGVGVPGVGVPGVGVPGVGVPGVGVPGVGVPGVGVPGVGVPGVGVPGVGVPGVGVPGVGVPGVGVPGVGVPGVGVPGVGVPGVGVPGVGVPGVGVPGVGVPGVGVPGVGVPGVGVPGVGVPGVGVPGVGVPGVGVPGVGVPGVGVPGVGVPGVGVPGVGVPGVGVPGVGVPGVGVPGVGVPGVGVPGVGVPGVGVPGVGVPGVGVPGVGVPGVGVPGVGVPGVGVPGVGVPGVGVPGVGVPGVGVPGVGVPGVGVPGVGVPGVGVPGVGVPGVGVPGVGVPGVGVPGVGVPGVGVPGVGVPGVGVPGVGVPGVGVPGVGVPGVGVPGVGVPGVGVPGVGVPGVGVPGVGVPGVGVPGVGVPGVGVPGVGVPGVGVPGVGVPGVGVPGVGVPGVGVPGVGVPGVGVPGVGVPGVGVPGVGVPGVGVPGVGVPGVGVPGVGVPGVGVPGVGVPGVGVPGVGVPGVGVPGVGVPGVGVPGVGVPGVGVPGVGVPGVGVPGVGVPGVGVPGVGVPGVGVPGVGVPGVGVPGVGVPGVGVPGVGVPGVGVPGVGVPGVGVPGVGVPGVGVPGVGVPGVGVPGVGVPGVGVPGVGVPGVGVPGVGVPGVGVPGVGVPGVGVPGVGVPGVGVPGVGVPGVGVPGVGVPGVGVPGVGVPGVGVPGVGVPGVGVPGVGVPGVGVPGVGVPGVGVPGVGVPGVGVPGVGVPGVGVPGVGVPGVGVPGVGVPGVGVPGVGVPGVGVPGVGVPGVGVPGVGVPGVGVPGVGVPGVGVPGVGVPGVGVPGVGVPGVGVPGVGVPGVGVPGVGVPGVGVPGVGVPGVGVPGVGVPGVGVPGVGVPGVGVPGVGVPGVGVPGVGVPGVGVPGVGVPGVGVPGVGVPGVGVPGVGVPGVGVPGVGVPGVGVPGVGVPGVGVPGVGVPGVGVPGVGVPGVGVPGVGVPGVGVPGVGVPGVGVPGVGVPGVGVPGVGVPGVGVPGVGVPGVGVPGVGVPGVGVPGVGVPGVGVPGVGVPGVGVPGVGVPGVGVPGVGVPGVGVPGVGVPGVGVPGVGVPGVGVPGVGVPGVGVPGVGVPGVGVPGVGVPGVGVPGVGVPGVGVPGVGVPGVGVPGVGVPGVGVPGVGVPGVGVPGVGVPGVGVPGVGVPGVGVPGVGVPGVGVPGVGVPGVGVPGVGVPGVGVPGVGVPGVGVPGVGVPGVGVPGVGVPGVGVPGVGVPGVGVPGVGVPGVGVPGVGVPGVGVPGVGVPGVGVPGVGVPGVGVPGVGVPGVGVPGVGVPGVGVPGVGVPGVGVPGVGVPGVGVPGVGVPGVGVPGVGVPGVGVPGVGVPGVGVPGVGVPGVGVPGVGVPGVGVPGVGVPGVGVPGVGVPGVGVPGVGVPGVGVPGVGVPGVGVPGVGVPGVGVPGVGVPGVGVPGVGVPGVGVPGVGVPGVGVPGVGVPGVGVPGVGVPGVGVPGVGVPGVGVPGVGVPGVGVPGVGVPGVGVPGVGVPGVGVPGVGVPGVGVPGVGVPGVGVPGVGVPGVGVPGVGVPGVGVPGVGVPGVGVPGVGVPGVGVPGVGVPGVGVPGVGVPGVGVPGVGVPGVGVPGVGVPGVGVPGVGVPGVGVPGVGVPGVGVPGVGVPGVGVPGVGVPGVGVPGVGVPGVGVPGVGVPGVGVPGVGVPGVGVPGVGVPGVGVPGVGVPGVGVPGVGVPGVGVPGVGVPGVGVPGVGVPGVGVPGVGVPGVGVPGVGVPGVGVPGVGVPGVGVPGVGVPGVGVPGVGVPGVGVPGVGVPGVGVPGVGVPGVGVPGVGVPGVGVPGVGVPGVGVPGVGVPGVGVPGVGVPGVGVPGVGVPGVGVPGVGVPGVGVPGVGVPGVGVPGVGVPGVGVPGVGVPGVGVPGVGVPGVGVPGVGVPGVGVPGVGVP

SEQ ID NO: 11 - protein, 625 aa, synthetic construct
  REPEAT 1..25: note = single repeat of (GVGVPGLGVPGVGVPGLGVPGVGVP)m, wherein m is an integer in the range of 4-25
  VARIANT 101..625: note = up to 21 copies of (GVGVPGLGVPGVGVPGLGVPGVGVP) can be deleted
GVGVPGLGVPGVGVPGLGVPGVGVPGVGVPGLGVPGVGVPGLGVPGVGVPGVGVPGLGVPGVGVPGLGVPGVGVPGVGVPGLGVPGVGVPGLGVPGVGVPGVGVPGLGVPGVGVPGLGVPGVGVPGVGVPGLGVPGVGVPGLGVPGVGVPGVGVPGLGVPGVGVPGLGVPGVGVPGVGVPGLGVPGVGVPGLGVPGVGVPGVGVPGLGVPGVGVPGLGVPGVGVPGVGVPGLGVPGVGVPGLGVPGVGVPGVGVPGLGVPGVGVPGLGVPGVGVPGVGVPGLGVPGVGVPGLGVPGVGVPGVGVPGLGVPGVGVPGLGVPGVGVPGVGVPGLGVPGVGVPGLGVPGVGVPGVGVPGLGVPGVGVPGLGVPGVGVPGVGVPGLGVPGVGVPGLGVPGVGVPGVGVPGLGVPGVGVPGLGVPGVGVPGVGVPGLGVPGVGVPGLGVPGVGVPGVGVPGLGVPGVGVPGLGVPGVGVPGVGVPGLGVPGVGVPGLGVPGVGVPGVGVPGLGVPGVGVPGLGVPGVGVPGVGVPGLGVPGVGVPGLGVPGVGVPGVGVPGLGVPGVGVPGLGVPGVGVPGVGVPGLGVPGVGVPGLGVPGVGVPGVGVPGLGVPGVGVPGLGVPGVGVP

SEQ ID NO: 12 - protein, 625 aa, synthetic construct
  REPEAT 1..25: note = single repeat of (GVGVPGVGVPGAGVPGVGVPGVGVP)m, wherein m is an integer in the range of 4-25
  VARIANT 101..625: note = up to 21 copies of (GVGVPGVGVPGAGVPGVGVPGVGVP) can be deleted
GVGVPGVGVPGAGVPGVGVPGVGVPGVGVPGVGVPGAGVPGVGVPGVGVPGVGVPGVGVPGAGVPGVGVPGVGVPGVGVPGVGVPGAGVPGVGVPGVGVPGVGVPGVGVPGAGVPGVGVPGVGVPGVGVPGVGVPGAGVPGVGVPGVGVPGVGVPGVGVPGAGVPGVGVPGVGVPGVGVPGVGVPGAGVPGVGVPGVGVPGVGVPGVGVPGAGVPGVGVPGVGVPGVGVPGVGVPGAGVPGVGVPGVGVPGVGVPGVGVPGAGVPGVGVPGVGVPGVGVPGVGVPGAGVPGVGVPGVGVPGVGVPGVGVPGAGVPGVGVPGVGVPGVGVPGVGVPGAGVPGVGVPGVGVPGVGVPGVGVPGAGVPGVGVPGVGVPGVGVPGVGVPGAGVPGVGVPGVGVPGVGVPGVGVPGAGVPGVGVPGVGVPGVGVPGVGVPGAGVPGVGVPGVGVPGVGVPGVGVPGAGVPGVGVPGVGVPGVGVPGVGVPGAGVPGVGVPGVGVPGVGVPGVGVPGAGVPGVGVPGVGVPGVGVPGVGVPGAGVPGVGVPGVGVPGVGVPGVGVPGAGVPGVGVPGVGVPGVGVPGVGVPGAGVPGVGVPGVGVPGVGVPGVGVPGAGVPGVGVPGVGVP

SEQ ID NO: 13 - protein, 625 aa, synthetic construct
  REPEAT 1..25: note = single repeat of (GVGVPGWGVPGVGVPGWGVPGVGVP)m, wherein m is an integer in the range of 4-25
  VARIANT 101..625: note = up to 21 copies of (GVGVPGWGVPGVGVPGWGVPGVGVP) can be deleted
GVGVPGWGVPGVGVPGWGVPGVGVPGVGVPGWGVPGVGVPGWGVPGVGVPGVGVPGWGVPGVGVPGWGVPGVGVPGVGVPGWGVPGVGVPGWGVPGVGVPGVGVPGWGVPGVGVPGWGVPGVGVPGVGVPGWGVPGVGVPGWGVPGVGVPGVGVPGWGVPGVGVPGWGVPGVGVPGVGVPGWGVPGVGVPGWGVPGVGVPGVGVPGWGVPGVGVPGWGVPGVGVPGVGVPGWGVPGVGVPGWGVPGVGVPGVGVPGWGVPGVGVPGWGVPGVGVPGVGVPGWGVPGVGVPGWGVPGVGVPGVGVPGWGVPGVGVPGWGVPGVGVPGVGVPGWGVPGVGVPGWGVPGVGVPGVGVPGWGVPGVGVPGWGVPGVGVPGVGVPGWGVPGVGVPGWGVPGVGVPGVGVPGWGVPGVGVPGWGVPGVGVPGVGVPGWGVPGVGVPGWGVPGVGVPGVGVPGWGVPGVGVPGWGVPGVGVPGVGVPGWGVPGVGVPGWGVPGVGVPGVGVPGWGVPGVGVPGWGVPGVGVPGVGVPGWGVPGVGVPGWGVPGVGVPGVGVPGWGVPGVGVPGWGVPGVGVPGVGVPGWGVPGVGVPGWGVPGVGVPGVGVPGWGVPGVGVPGWGVPGVGVP

SEQ ID NO: 14 - protein, 1125 aa, synthetic construct
  REPEAT 1..45: note = single repeat of (GVGVPGVGVPGVGVPGVGVPGVGVPGVGVPGEGVPGFGVPGVGVP)m, wherein m is an integer in the range of 4-25
  VARIANT 46..1125: note = up to 21 copies of (GVGVPGVGVPGVGVPGVGVPGVGVPGVGVPGEGVPGFGVPGVGVP) can be deleted
GVGVPGVGVPGVGVPGVGVPGVGVPGVGVPGEGVPGFGVPGVGVPGVGVPGVGVPGVGVPGVGVPGVGVPGVGVPGEGVPGFGVPGVGVPGVGVPGVGVPGVGVPGVGVPGVGVPGVGVPGEGVPGFGVPGVGVPGVGVPGVGVPGVGVPGVGVPGVGVPGVGVPGEGVPGFGVPGVGVPGVGVPGVGVPGVGVPGVGVPGVGVPGVGVPGEGVPGFGVPGVGVPGVGVPGVGVPGVGVPGVGVPGVGVPGVGVPGEGVPGFGVPGVGVPGVGVPGVGVPGVGVPGVGVPGVGVPGVGVPGEGVPGFGVPGVGVPGVGVPGVGVPGVGVPGVGVPGVGVPGVGVPGEGVPGFGVPGVGVPGVGVPGVGVPGVGVPGVGVPGVGVPGVGVPGEGVPGFGVPGVGVPGVGVPGVGVPGVGVPGVGVPGVGVPGVGVPGEGVPGFGVPGVGVPGVGVPGVGVPGVGVPGVGVPGVGVPGVGVPGEGVPGFGVPGVGVPGVGVPGVGVPGVGVPGVGVPGVGVPGVGVPGEGVPGFGVPGVGVPGVGVPGVGVPGVGVPGVGVPGVGVPGVGVPGEGVPGFGVPGVGVPGVGVPGVGVPGVGVPGVGVPGVGVPGVGVPGEGVPGFGVPGVGVPGVGVPGVGVPGVGVPGVGVPGVGVPGVGVPGEGVPGFGVPGVGVPGVGVPGVGVPGVGVPGVGVPGVGVPGVGVPGEGVPGFGVPGVGVPGVGVPGVGVPGVGVPGVGVPGVGVPGVGVPGEGVPGFGVPGVGVPGVGVPGVGVPGVGVPGVGVPGVGVPGVGVPGEGVPGFGVPGVGVPGVGVPGVGVPGVGVPGVGVPGVGVPGVGVPGEGVPGFGVPGVGVPGVGVPGVGVPGVGVPGVGVPGVGVPGVGVPGEGVPGFGVPGVGVPGVGVPGVGVPGVGVPGVGVPGVGVPGVGVPGEGVPGFGVPGVGVPGVGVPGVGVPGVGVPGVGVPGVGVPGVGVPGEGVPGFGVPGVGVPGVGVPGVGVPGVGVPGVGVPGVGVPGVGVPGEGVPGFGVPGVGVPGVGVPGVGVPGVGVPGVGVPGVGVPGVGVPGEGVPGFGVPGVGVPGVGVPGVGVPGVGVPGVGVPGVGVPGVGVPGEGVPGFGVPGVGVP

SEQ ID NO: 15 - protein, 1125 aa, synthetic construct
  REPEAT 1..45: note = single repeat of (GVGVPGVGVPGVGVPGVGVPGVGVPGVGVPGKGVPGFGVPGVGVP)m, wherein m is an integer in the range of 4-25
  VARIANT 46..1125: note = up to 21 copies of (GVGVPGVGVPGVGVPGVGVPGVGVPGVGVPGKGVPGFGVPGVGVP) can be deleted
GVGVPGVGVPGVGVPGVGVPGVGVPGVGVPGKGVPGFGVPGVGVPGVGVPGVGVPGVGVPGVGVPGVGVPGVGVPGKGVPGFGVPGVGVPGVGVPGVGVPGVGVPGVGVPGVGVPGVGVPGKGVPGFGVPGVGVPGVGVPGVGVPGVGVPGVGVPGVGVPGVGVPGKGVPGFGVPGVGVPGVGVPGVGVPGVGVPGVGVPGVGVPGVGVPGKGVPGFGVPGVGVPGVGVPGVGVPGVGVPGVGVPGVGVPGVGVPGKGVPGFGVPGVGVPGVGVPGVGVPGVGVPGVGVPGVGVPGVGVPGKGVPGFGVPGVGVPGVGVPGVGVPGVGVPGVGVPGVGVPGVGVPGKGVPGFGVPGVGVPGVGVPGVGVPGVGVPGVGVPGVGVPGVGVPGKGVPGFGVPGVGVPGVGVPGVGVPGVGVPGVGVPGVGVPGVGVPGKGVPGFGVPGVGVPGVGVPGVGVPGVGVPGVGVPGVGVPGVGVPGKGVPGFGVPGVGVPGVGVPGVGVPGVGVPGVGVPGVGVPGVGVPGKGVPGFGVPGVGVPGVGVPGVGVPGVGVPGVGVPGVGVPGVGVPGKGVPGFGVPGVGVPGVGVPGVGVPGVGVPGVGVPGVGVPGVGVPGKGVPGFGVPGVGVPGVGVPGVGVPGVGVPGVGVPGVGVPGVGVPGKGVPGFGVPGVGVPGVGVPGVGVPGVGVPGVGVPGVGVPGVGVPGKGVPGFGVPGVGVPGVGVPGVGVPGVGVPGVGVPGVGVPGVGVPGKGVPGFGVPGVGVPGVGVPGVGVPGVGVPGVGVPGVGVPGVGVPGKGVPGFGVPGVGVPGVGVPGVGVPGVGVPGVGVPGVGVPGVGVPGKGVPGFGVPGVGVPGVGVPGVGVPGVGVPGVGVPGVGVPGVGVPGKGVPGFGVPGVGVPGVGVPGVGVPGVGVPGVGVPGVGVPGVGVPGKGVPGFGVPGVGVPGVGVPGVGVPGVGVPGVGVPGVGVPGVGVPGKGVPGFGVPGVGVPGVGVPGVGVPGVGVPGVGVPGVGVPGVGVPGKGVPGFGVPGVGVPGVGVPGVGVPGVGVPGVGVPGVGVPGVGVPGKGVPGFGVPGVGVPGVGVPGVGVPGVGVPGVGVPGVGVPGVGVPGKGVPGFGVPGVGVP

SEQ ID NO: 16 - protein, 625 aa, synthetic construct
  REPEAT 1..25: note = single repeat of (GAGVPGVGVPGAGVPGVGVPGAGVP)m, wherein m is an integer in the range of 4-25
  VARIANT 26..625: note = up to 21 copies of (GAGVPGVGVPGAGVPGVGVPGAGVP) can be deleted
GAGVPGVGVPGAGVPGVGVPGAGVPGAGVPGVGVPGAGVPGVGVPGAGVPGAGVPGVGVPGAGVPGVGVPGAGVPGAGVPGVGVPGAGVPGVGVPGAGVPGAGVPGVGVPGAGVPGVGVPGAGVPGAGVPGVGVPGAGVPGVGVPGAGVPGAGVPGVGVPGAGVPGVGVPGAGVPGAGVPGVGVPGAGVPGVGVPGAGVPGAGVPGVGVPGAGVPGVGVPGAGVPGAGVPGVGVPGAGVPGVGVPGAGVPGAGVPGVGVPGAGVPGVGVPGAGVPGAGVPGVGVPGAGVPGVGVPGAGVPGAGVPGVGVPGAGVPGVGVPGAGVPGAGVPGVGVPGAGVPGVGVPGAGVPGAGVPGVGVPGAGVPGVGVPGAGVPGAGVPGVGVPGAGVPGVGVPGAGVPGAGVPGVGVPGAGVPGVGVPGAGVPGAGVPGVGVPGAGVPGVGVPGAGVPGAGVPGVGVPGAGVPGVGVPGAGVPGAGVPGVGVPGAGVPGVGVPGAGVPGAGVPGVGVPGAGVPGVGVPGAGVPGAGVPGVGVPGAGVPGVGVPGAGVPGAGVPGVGVPGAGVPGVGVPGAGVPGAGVPGVGVPGAGVPGVGVPGAGVPGAGVPGVGVPGAGVPGVGVPGAGVP

SEQ ID NO: 17 - protein, 800 aa, synthetic construct
  REPEAT 1..25: note = single repeat of (GVGVPGVGVPGAGVPGVGVPGVGVP)m, wherein m is an integer between 2 and 32
  VARIANT 51..800: note = up to 30 copies of (GVGVPGVGVPGAGVPGVGVPGVGVP) can be deleted
GVGVPGVGVPGAGVPGVGVPGVGVPGVGVPGVGVPGAGVPGVGVPGVGVPGVGVPGVGVPGAGVPGVGVPGVGVPGVGVPGVGVPGAGVPGVGVPGVGVPGVGVPGVGVPGAGVPGVGVPGVGVPGVGVPGVGVPGAGVPGVGVPGVGVPGVGVPGVGVPGAGVPGVGVPGVGVPGVGVPGVGVPGAGVPGVGVPGVGVPGVGVPGVGVPGAGVPGVGVPGVGVPGVGVPGVGVPGAGVPGVGVPGVGVPGVGVPGVGVPGAGVPGVGVPGVGVPGVGVPGVGVPGAGVPGVGVPGVGVPGVGVPGVGVPGAGVPGVGVPGVGVPGVGVPGVGVPGAGVPGVGVPGVGVPGVGVPGVGVPGAGVPGVGVPGVGVPGVGVPGVGVPGAGVPGVGVPGVGVPGVGVPGVGVPGAGVPGVGVPGVGVPGVGVPGVGVPGAGVPGVGVPGVGVPGVGVPGVGVPGAGVPGVGVPGVGVPGVGVPGVGVPGAGVPGVGVPGVGVPGVGVPGVGVPGAGVPGVGVPGVGVPGVGVPGVGVPGAGVPGVGVPGVGVPGVGVPGVGVPGAGVPGVGVPGVGVPGVGVPGVGVPGAGVPGVGVPGVGVPGVGVPGVGVPGAGVPGVGVPGVGVPGVGVPGVGVPGAGVPGVGVPGVGVPGVGVPGVGVPGAGVPGVGVPGVGVPGVGVPGVGVPGAGVPGVGVPGVGVPGVGVPGVGVPGAGVPGVGVPGVGVPGVGVPGVGVPGAGVPGVGVPGVGVPGVGVPGVGVPGAGVPGVGVPGVGVPGVGVPGVGVPGAGVPGVGVPGVGVP

SEQ ID NO: 18 - protein, 800 aa, synthetic construct
  REPEAT 1..25: note = single repeat of (GVGVPGVGVPGLGVPGVGVPGVGVP)m, wherein m is an integer between 2 and 32
  VARIANT 51..800: note = up to 30 copies of (GVGVPGVGVPGLGVPGVGVPGVGVP) can be deleted
GVGVPGVGVPGLGVPGVGVPGVGVPGVGVPGVGVPGLGVPGVGVPGVGVPGVGVPGVGVPGLGVPGVGVPGVGVPGVGVPGVGVPGLGVPGVGVPGVGVPGVGVPGVGVPGLGVPGVGVPGVGVPGVGVPGVGVPGLGVPGVGVPGVGVPGVGVPGVGVPGLGVPGVGVPGVGVPGVGVPGVGVPGLGVPGVGVPGVGVPGVGVPGVGVPGLGVPGVGVPGVGVPGVGVPGVGVPGLGVPGVGVPGVGVPGVGVPGVGVPGLGVPGVGVPGVGVPGVGVPGVGVPGLGVPGVGVPGVGVPGVGVPGVGVPGLGVPGVGVPGVGVPGVGVPGVGVPGLGVPGVGVPGVGVPGVGVPGVGVPGLGVPGVGVPGVGVPGVGVPGVGVPGLGVPGVGVPGVGVPGVGVPGVGVPGLGVPGVGVPGVGVPGVGVPGVGVPGLGVPGVGVPGVGVPGVGVPGVGVPGLGVPGVGVPGVGVPGVGVPGVGVPGLGVPGVGVPGVGVPGVGVPGVGVPGLGVPGVGVPGVGVPGVGVPGVGVPGLGVPGVGVPGVGVPGVGVPGVGVPGLGVPGVGVPGVGVPGVGVPGVGVPGLGVPGVGVPGVGVPGVGVPGVGVPGLGVPGVGVPGVGVPGVGVPGVGVPGLGVPGVGVPGVGVPGVGVPGVGVPGLGVPGVGVPGVGVPGVGVPGVGVPGLGVPGVGVPGVGVPGVGVPGVGVPGLGVPGVGVPGVGVPGVGVPGVGVPGLGVPGVGVPGVGVPGVGVPGVGVPGLGVPGVGVPGVGVPGVGVPGVGVPGLGVPGVGVPGVGVP

SEQ ID NO: 19 - protein, 400 aa, synthetic construct
  REPEAT 1..25: note = single repeat of (GVGVPGVGVPGAGVPGVGVPGVGVP)m, wherein m is 8 or 16
  VARIANT 201..400: note = 8 copies of (GVGVPGVGVPGAGVPGVGVPGVGVP) can be deleted
GVGVPGVGVPGAGVPGVGVPGVGVPGVGVPGVGVPGAGVPGVGVPGVGVPGVGVPGVGVPGAGVPGVGVPGVGVPGVGVPGVGVPGAGVPGVGVPGVGVPGVGVPGVGVPGAGVPGVGVPGVGVPGVGVPGVGVPGAGVPGVGVPGVGVPGVGVPGVGVPGAGVPGVGVPGVGVPGVGVPGVGVPGAGVPGVGVPGVGVPGVGVPGVGVPGAGVPGVGVPGVGVPGVGVPGVGVPGAGVPGVGVPGVGVPGVGVPGVGVPGAGVPGVGVPGVGVPGVGVPGVGVPGAGVPGVGVPGVGVPGVGVPGVGVPGAGVPGVGVPGVGVPGVGVPGVGVPGAGVPGVGVPGVGVPGVGVPGVGVPGAGVPGVGVPGVGVPGVGVPGVGVPGAGVPGVGVPGVGVP

SEQ ID NO: 20 - protein, 800 aa, synthetic construct
  REPEAT 1..10: note = single repeat of (GVGVPGAGVP)m, wherein m is an integer between 5 and 80
  VARIANT 51..800: note = up to 75 copies of (GVGVPGAGVP) can be deleted
GVGVPGAGVPGVGVPGAGVPGVGVPGAGVPGVGVPGAGVPGVGVPGAGVPGVGVPGAGVPGVGVPGAGVPGVGVPGAGVPGVGVPGAGVPGVGVPGAGVPGVGVPGAGVPGVGVPGAGVPGVGVPGAGVPGVGVPGAGVPGVGVPGAGVPGVGVPGAGVPGVGVPGAGVPGVGVPGAGVPGVGVPGAGVPGVGVPGAGVPGVGVPGAGVPGVGVPGAGVPGVGVPGAGVPGVGVPGAGVPGVGVPGAGVPGVGVPGAGVPGVGVPGAGVPGVGVPGAGVPGVGVPGAGVPGVGVPGAGVPGVGVPGAGVPGVGVPGAGVPGVGVPGAGVPGVGVPGAGVPGVGVPGAGVPGVGVPGAGVPGVGVPGAGVPGVGVPGAGVPGVGVPGAGVPGVGVPGAGVPGVGVPGAGVPGVGVPGAGVPGVGVPGAGVPGVGVPGAGVPGVGVPGAGVPGVGVPGAGVPGVGVPGAGVPGVGVPGAGVPGVGVPGAGVPGVGVPGAGVPGVGVPGAGVPGVGVPGAGVPGVGVPGAGVPGVGVPGAGVPGVGVPGAGVPGVGVPGAGVPGVGVPGAGVPGVGVPGAGVPGVGVPGAGVPGVGVPGAGVPGVGVPGAGVPGVGVPGAGVPGVGVPGAGVPGVGVPGAGVPGVGVPGAGVPGVGVPGAGVPGVGVPGAGVPGVGVPGAGVPGVGVPGAGVPGVGVPGAGVPGVGVPGAGVPGVGVPGAGVPGVGVPGAGVPGVGVPGAGVPGVGVPGAGVPGVGVPGAGVPGVGVPGAGVPGVGVPGAGVPGVGVPGAGVPGVGVPGAGVP

SEQ ID NO: 21 - protein, 800 aa, synthetic construct
  REPEAT 1..5: note = single repeat of (GXGVP)m, wherein m is an integer between 10 and 160
  VARIANT 51..800: note = up to 150 copies of (GXGVP) can be deleted
  VARIANT 2: note = G, A, V, I, L, F, Y, W, K, R, D, E or S
  VARIANT 7: note = G, A, V, I, L, F, Y, W, K, R, D, E or S
  VARIANT 12: note = G, A, V, I, L, F, Y, W, K, R, D, E or S
  VARIANT 17: note = G, A, V, I, L, F, Y, W, K, R, D, E or S
  VARIANT 22: note = G, A, V, I, L, F, Y, W, K, R, D, E or S
  VARIANT 27: note = G, A, V, I, L, F, Y, W, K, R, D, E or S
  VARIANT 32: note = G, A, V, I, L, F, Y, W, K, R, D, E or S
  VARIANT 37: note = G, A, V, I, L, F, Y, W, K, R, D, E or S
  VARIANT 42: note = G, A, V, I, L, F, Y, W, K, R, D, E or S
  VARIANT 47: note = G, A, V, I, L, F, Y, W, K, R, D, E or S
  VARIANT 52: note = G, A, V, I, L, F, Y, W, K, R, D, E or S
  VARIANT 57: note = G, A, V, I, L, F, Y, W, K, R, D, E or S
  VARIANT 62: note = G, A, V, I, L, F, Y, W, K, R, D, E or S
  VARIANT 67: note = G, A, V, I, L, F, Y, W, K, R, D, E or S
  VARIANT 72: note = G, A, V, I, L, F, Y, W, K, R, D, E or S
  VARIANT 77: note = G, A, V, I, L, F, Y, W, K, R, D, E or S
  VARIANT 82: note = G, A, V, I, L, F, Y, W, K, R, D, E or S
  VARIANT 87: note = G, A, V, I, L, F, Y, W, K, R, D, E or S
  VARIANT 92: note = G, A, V, I, L, F, Y, W, K, R, D, E or S
  VARIANT 97: note = G, A, V, I, L, F, Y, W, K, R, D, E or S
  VARIANT 102: note = G, A, V, I, L, F, Y, W, K, R, D, E or S
  VARIANT 107: note = G, A, V, I, L, F, Y, W, K, R, D, E or S
  VARIANT 112: note = G, A, V, I, L, F, Y, W, K, R, D, E or S
  VARIANT 117: note = G, A, V, I, L, F, Y, W, K, R, D, E or S
  VARIANT 122: note = G, A, V, I, L, F, Y, W, K, R, D, E or S
  VARIANT 127: note = G, A, V, I, L, F, Y, W, K, R, D, E or S
  VARIANT 132: note = G, A, V, I, L, F, Y, W, K, R, D, E or S
  VARIANT 137: note = G, A, V, I, L, F, Y, W, K, R, D, E or S
  VARIANT 142: note = G, A, V, I, L, F, Y, W, K, R, D, E or S
  VARIANT 147: note = G, A, V, I, L, F, Y, W, K, R, D, E or S
  VARIANT 152: note = G, A, V, I, L, F, Y, W, K, R, D, E or S
  VARIANT 157: note = G, A, V, I, L, F, Y, W, K, R, D, E or S
  VARIANT 162: note = G, A, V, I, L, F, Y, W, K, R, D, E or S
  VARIANT 167: note = G, A, V, I, L, F, Y, W, K, R, D, E or S
  VARIANT 172: note = G, A, V, I, L, F, Y, W, K, R, D, E or S
  VARIANT 177: note = G, A, V, I, L, F, Y, W, K, R, D, E or S
  VARIANT 182: note = G, A, V, I, L, F, Y, W, K, R, D, E or S
  VARIANT 187: note = G, A, V, I, L, F, Y, W, K, R, D, E or S
  VARIANT 192: note = G, A, V, I, L, F, Y, W, K, R, D, E or S
  VARIANT 197: note = G, A, V, I, L, F, Y, W, K, R, D, E or S
  VARIANT 202: note = G, A, V, I, L, F, Y, W, K, R, D, E or S
  VARIANT 207: note = G, A, V, I, L, F, Y, W, K, R, D, E or S
  VARIANT 212: note = G, A, V, I, L, F, Y, W, K, R, D, E or S
  VARIANT 217: note = G, A, V, I, L, F, Y, W, K, R, D, E or S
  VARIANT 222: note = G, A, V, I, L, F, Y, W, K, R, D, E or S
  VARIANT 227: note = G, A, V, I, L, F, Y, W, K, R, D, E or S
  VARIANT 232: note = G, A, V, I, L, F, Y, W, K, R, D, E or S
  VARIANT 237: note = G, A, V, I, L, F, Y, W, K, R, D, E or S
  VARIANT 242: note = G, A, V, I, L, F, Y, W, K, R, D, E or S
  VARIANT 247: note = G, A, V, I, L, F, Y, W, K, R, D, E or S
  VARIANT 252: note = G, A, V, I, L, F, Y, W, K, R, D, E or S
  VARIANT 257: note = G, A, V, I, L, F, Y, W, K, R, D, E or S
  VARIANT 262: note = G, A, V, I, L, F, Y, W, K, R, D, E or S
  VARIANT 267: note = G, A, V, I, L, F, Y, W, K, R, D, E or S
  VARIANT 272: note = G, A, V, I, L, F, Y, W, K, R, D, E or S
  VARIANT 277: note = G, A, V, I, L, F, Y, W, K, R, D, E or S
  VARIANT 282: note = G, A, V, I, L, F, Y, W, K, R, D, E or S
  VARIANT 287: note = G, A, V, I, L, F, Y, W, K, R, D, E or S
  VARIANT 292: note = G, A, V, I, L, F, Y, W, K, R, D, E or S
  VARIANT 297: note = G, A, V, I, L, F, Y, W, K, R, D, E or S
  VARIANT 302: note = G, A, V, I, L, F, Y, W, K, R, D, E or S
  VARIANT 307: note = G, A, V, I, L, F, Y, W, K, R, D, E or S
  VARIANT 312: note = G, A, V, I, L, F, Y, W, K, R, D, E or S
  VARIANT 317: note = G, A, V, I, L, F, Y, W, K, R, D, E or S
  VARIANT 322: note = G, A, V, I, L, F, Y, W, K, R, D, E or S
  VARIANT 327: note = G, A, V, I, L, F, Y, W, K, R, D, E or S
  VARIANT 332: note = G, A, V, I, L, F, Y, W, K, R, D, E or S
  VARIANT 337: note = G, A, V, I, L, F, Y, W, K, R, D, E or S
  VARIANT 342: note = G, A, V, I, L, F, Y, W, K, R, D, E or S
  VARIANT 347: note = G, A, V, I, L, F, Y, W, K, R, D, E or S
  VARIANT 352: note = G, A, V, I, L, F, Y, W, K, R, D, E or S
  VARIANT 357: note = G, A, V, I, L, F, Y, W, K, R, D, E or S
  VARIANT 362: note = G, A, V, I, L, F, Y, W, K, R, D, E or S
  VARIANT 367: note = G, A, V, I, L, F, Y, W, K, R, D, E or S
  VARIANT 372: note = G, A, V, I, L, F, Y, W, K, R, D, E or S
  VARIANT 377: note = G, A, V, I, L, F, Y, W, K, R, D, E or S
  VARIANT 382: note = G, A, V, I, L, F, Y, W, K, R, D, E or S
  VARIANT 387: note = G, A, V, I, L, F, Y, W, K, R, D, E or S
  VARIANT 392: note = G, A, V, I, L, F, Y, W, K, R, D, E or S
  VARIANT 397: note = G, A, V, I, L, F, Y, W, K, R, D, E or S
  VARIANT 402: note = G, A, V, I, L, F, Y, W, K, R, D, E or S
  VARIANT 407: note = G, A, V, I, L, F, Y, W, K, R, D, E or S
  VARIANT 412: note = G, A, V, I, L, F, Y, W, K, R, D, E or S
  VARIANT 417: note = G, A, V, I, L, F, Y, W, K, R, D, E or S
  VARIANT 422: note = G, A, V, I, L, F, Y, W, K, R, D, E or S
  VARIANT 427: note = G, A, V, I, L, F, Y, W, K, R, D, E or S
  VARIANT 432: note = G, A, V, I, L, F, Y, W, K, R, D, E or S
  VARIANT 437: note = G, A, V, I, L, F, Y, W, K, R, D, E or S
  VARIANT 442: note = G, A, V, I, L, F, Y, W, K, R, D, E or S
  VARIANT 447: note = G, A, V, I, L, F, Y, W, K, R, D, E or S
  VARIANT 452: note = G, A, V, I, L, F, Y, W, K, R, D, E or S
  VARIANT 457: note = G, A, V, I, L, F, Y, W, K, R, D, E or S
  VARIANT 462: note = G, A, V, I, L, F, Y, W, K, R, D, E or S
  VARIANT 467: note = G, A, V, I, L, F, Y, W, K, R, D, E or S
  VARIANT 472: note = G, A, V, I, L, F, Y, W, K, R, D, E or S
  VARIANT 477: note = G, A, V, I, L, F, Y, W, K, R, D, E or S
  VARIANT 482: note = G, A, V, I, L, F, Y, W, K, R, D, E or S
  VARIANT 487: note = G, A, V, I, L, F, Y, W, K, R, D, E or S
  VARIANT 492: note = G, A, V, I, L, F, Y, W, K, R, D, E or S
  VARIANT 497: note = G, A, V, I, L, F, Y, W, K, R, D, E or S
  VARIANT 502: note = G, A, V, I, L, F, Y, W, K, R, D, E or S
  VARIANT 507: note = G, A, V, I, L, F, Y, W, K, R, D, E or S
  VARIANT 512: note = G, A, V, I, L, F, Y, W, K, R, D, E or S
  VARIANT 517: note = G, A, V, I, L, F, Y, W, K, R, D, E or S
  VARIANT 522: note = G, A, V, I, L, F, Y, W, K, R, D, E or S
  VARIANT 527: note = G, A, V, I, L, F, Y, W, K, R, D, E or S
  VARIANT 532: note = G, A, V, I, L, F, Y, W, K, R, D, E or S
  VARIANT 537: note = G, A, V, I, L, F, Y, W, K, R, D, E or S
  VARIANT 542: note = G, A, V, I, L, F, Y, W, K, R, D, E or S
  VARIANT 547: note = G, A, V, I, L, F, Y, W, K, R, D, E or S
  VARIANT 552: note = G, A, V, I, L, F, Y, W, K, R, D, E or S
  VARIANT 557: note = G, A, V, I, L, F, Y, W, K, R, D, E or S
  VARIANT 562: note = G, A, V, I, L, F, Y, W, K, R, D, E or S
  VARIANT 567: note = G, A, V, I, L, F, Y, W, K, R, D, E or S
  VARIANT 572: note = G, A, V, I, L, F, Y, W, K, R, D, E or S
  VARIANT 577: note = G, A, V, I, L, F, Y, W, K, R, D, E or S
  VARIANT 582: note = G, A, V, I, L, F, Y, W, K, R, D, E or S
  VARIANT 587: note = G, A, V, I, L, F, Y, W, K, R, D, E or S
  VARIANT 592: note = G, A, V, I, L, F, Y, W, K, R, D, E or S
  VARIANT 597: note = G, A, V, I, L, F, Y, W, K, R, D, E or S
  VARIANT 602: note = G, A, V, I, L, F, Y, W, K, R, D, E or S
  VARIANT 607: note = G, A, V, I, L, F, Y, W, K, R, D, E or S
  VARIANT 612: note = G, A, V, I, L, F, Y, W, K, R, D, E or S
  VARIANT 617: note = G, A, V, I, L, F, Y, W, K, R, D, E or S
  VARIANT 622: note = G, A, V, I, L, F, Y, W, K, R, D, E or S
  VARIANT 627: note = G, A, V, I, L, F, Y, W, K, R, D, E or S
  VARIANT 632: note = G, A, V, I, L, F, Y, W, K, R, D, E or S
  VARIANT 637: note = G, A, V, I, L, F, Y, W, K, R, D, E or S
  VARIANT 642: note = G, A, V, I, L, F, Y, W, K, R, D, E or S
  VARIANT 647: note = G, A, V, I, L, F, Y, W, K, R, D, E or S
  VARIANT 652: note = G, A, V, I, L, F, Y, W, K, R, D, E or S
  VARIANT 657: note = G, A, V, I, L, F, Y, W, K, R, D, E or S
  VARIANT 662: note = G, A, V, I, L, F, Y, W, K, R, D, E or S
  VARIANT 667: note = G, A, V, I, L, F, Y, W, K, R, D, E or S
  VARIANT 672: note = G, A, V, I, L, F, Y, W, K, R, D, E or S
  VARIANT 677: note = G, A, V, I, L, F, Y, W, K, R, D, E or S
  VARIANT 682: note = G, A, V, I, L, F, Y, W, K, R, D, E or S
  VARIANT 687: note = G, A, V, I, L, F, Y, W, K, R, D, E or S
  VARIANT 692: note = G, A, V, I, L, F, Y, W, K, R, D, E or S
  VARIANT 697: note = G, A, V, I, L, F, Y, W, K, R, D, E or S
  VARIANT 702: note = G, A, V, I, L, F, Y, W, K, R, D, E or S
  VARIANT 707: note = G, A, V, I, L, F, Y, W, K, R, D, E or S
  VARIANT 712: note = G, A, V, I, L, F, Y, W, K, R, D, E or S
  VARIANT 717: note = G, A, V, I, L, F, Y, W, K, R, D, E or S
  VARIANT 722: note = G, A, V, I, L, F, Y, W, K, R, D, E or S
  VARIANT 727: note = G, A, V, I, L, F, Y, W, K, R, D, E or S
  VARIANT 732: note = G, A, V, I, L, F, Y, W, K, R, D, E or S
  VARIANT 737: note = G, A, V, I, L, F, Y, W, K, R, D, E or S
  VARIANT 742: note = G, A, V, I, L, F, Y, W, K, R, D, E or S
  VARIANT 747: note = G, A, V, I, L, F, Y, W, K, R, D, E or S
  VARIANT 752: note = G, A, V, I, L, F, Y, W, K, R, D, E or S
  VARIANT 757: note = G, A, V, I, L, F, Y, W, K, R, D, E or S
  VARIANT 762: note = G, A, V, I, L, F, Y, W, K, R, D, E or S
  VARIANT 767: note = G, A, V, I, L, F, Y, W, K, R, D, E or S
  VARIANT 772: note = G, A, V, I, L, F, Y, W, K, R, D, E or S
  VARIANT 777: note = G, A, V, I, L, F, Y, W, K, R, D, E or S
  VARIANT 782: note = G, A, V, I, L, F, Y, W, K, R, D, E or S
  VARIANT 787: note = G, A, V, I, L, F, Y, W, K, R, D, E or S
  VARIANT 792: note = G, A, V, I, L, F, Y, W, K, R, D, E or S
  VARIANT 797: note = G, A, V, I, L, F, Y, W, K, R, D, E or S
GXGVPGXGVPGXGVPGXGVPGXGVPGXGVPGXGVPGXGVPGXGVPGXGVPGXGVPGXGVPGXGVPGXGVPGXGVPGXGVPGXGVPGXGVPGXGVPGXGVPGXGVPGXGVPGXGVPGXGVPGXGVPGXGVPGXGVPGXGVPGXGVPGXGVPGXGVPGXGVPGXGVPGXGVPGXGVPGXGVPGXGVPGXGVPGXGVPGXGVPGXGVPGXGVPGXGVPGXGVPGXGVPGXGVPGXGVPGXGVPGXGVPGXGVPGXGVPGXGVPGXGVPGXGVPGXGVPGXGVPGXGVPGXGVPGXGVPGXGVPGXGVPGXGVPGXGVPGXGVPGXGVPGXGVPGXGVPGXGVPGXGVPGXGVPGXGVPGXGVPGXGVPGXGVPGXGVPGXGVPGXGVPGXGVPGXGVPGXGVPGXGVPGXGVPGXGVPGXGVPGXGVPGXGVPGXGVPGXGVPGXGVPGXGVPGXGVPGXGVPGXGVPGXGVPGXGVPGXGVPGXGVPGXGVPGXGVPGXGVPGXGVPGXGVPGXGVPGXGVPGXGVPGXGVPGXGVPGXGVPGXGVPGXGVPGXGVPGXGVPGXGVPGXGVPGXGVPGXGVPGXGVPGXGVPGXGVPGXGVPGXGVPGXGVPGXGVPGXGVPGXGVPGXGVPGXGVPGXGVPGXGVPGXGVPGXGVPGXGVPGXGVPGXGVPGXGVPGXGVPGXGVPGXGVPGXGVPGXGVPGXGVPGXGVPGXGVPGXGVPGXGVPGXGVPGXGVPGXGVPGXGVPGXGVPGXGVPGXGVPGXGVPGXGVPGXGVPGXGVPGXGVPGXGVPGXGVPGXGVP

SEQ ID NO: 22 - protein, 800 aa, synthetic construct
  REPEAT 1..5: note = single repeat of (GVGVP)m, wherein m is an integer between 10 and 160
  VARIANT 51..800: note = up to 150 copies of (GVGVP) can be deleted
GVGVPGVGVPGVGVPGVGVPGVGVPGVGVPGVGVPGVGVPGVGVPGVGVPGVGVPGVGVPGVGVPGVGVPGVGVPGVGVPGVGVPGVGVPGVGVPGVGVPGVGVPGVGVPGVGVPGVGVPGVGVPGVGVPGVGVPGVGVPGVGVPGVGVPGVGVPGVGVPGVGVPGVGVPGVGVPGVGVPGVGVPGVGVPGVGVPGVGVPGVGVPGVGVPGVGVPGVGVPGVGVPGVGVPGVGVPGVGVPGVGVPGVGVPGVGVPGVGVPGVGVPGVGVPGVGVPGVGVPGVGVPGVGVPGVGVPGVGVPGVGVPGVGVPGVGVPGVGVPGVGVPGVGVPGVGVPGVGVPGVGVPGVGVPGVGVPGVGVPGVGVPGVGVPGVGVPGVGVPGVGVPGVGVPGVGVPGVGVPGVGVPGVGVPGVGVPGVGVPGVGVPGVGVPGVGVPGVGVPGVGVPGVGVPGVGVPGVGVPGVGVPGVGVPGVGVPGVGVPGVGVPGVGVPGVGVPGVGVPGVGVPGVGVPGVGVPGVGVPGVGVPGVGVPGVGVPGVGVPGVGVPGVGVPGVGVPGVGVPGVGVPGVGVPGVGVPGVGVPGVGVPGVGVPGVGVPGVGVPGVGVPGVGVPGVGVPGVGVPGVGVPGVGVPGVGVPGVGVPGVGVPGVGVPGVGVPGVGVPGVGVPGVGVPGVGVPGVGVPGVGVPGVGVPGVGVPGVGVPGVGVPGVGVPGVGVPGVGVPGVGVPGVGVPGVGVPGVGVPGVGVPGVGVPGVGVPGVGVPGVGVPGVGVPGVGVPGVGVPGVGVPGVGVPGVGVPGVGVP

SEQ ID NO: 23 - protein, 1440 aa, synthetic construct
  REPEAT 1..9: note = single repeat of (XXPXXXXGX)m, wherein m is an integer between 10 and 160
  VARIANT 91..1440: note = up to 150 copies of (XXPXXXXGX) can be deleted
  VARIANT 4..7: note = any amino acid except P or G or may be absent
  VARIANT 13..16: note = any amino acid except P or G or may be absent
  VARIANT 22..25: note = any amino acid except P or G or may be absent
  VARIANT 31..34: note = any amino acid except P or G or may be absent
  VARIANT 40..43: note = any amino acid except P or G or may be absent
  VARIANT 49..52: note = any amino acid except P or G or may be absent
  VARIANT 58..61: note = any amino acid except P or G or may be absent
  VARIANT 67..70: note = any amino acid except P or G or may be absent
  VARIANT 76..79: note = any amino acid except P or G or may be absent
  VARIANT 85..88: note = any amino acid except P or G or may be absent
  VARIANT 94..97: note = any amino acid except P or G or may be absent
  VARIANT 103..106: note = any amino acid except P or G or may be absent
  VARIANT 112..115: note = any amino acid except P or G or may be absent
  VARIANT 121..124: note = any amino acid except P or G or may be absent
  VARIANT 130..133: note = any amino acid except P or G or may be absent
  VARIANT 139..142: note = any amino acid except P or G or may be absent
  VARIANT 148..151: note = any amino acid except P or G or may be absent
  VARIANT 157..160: note = any amino acid except P or G or may be absent
  VARIANT 166..169: note = any amino acid except P or G or may be absent
  VARIANT 175..178: note = any amino acid except P or G or may be absent
  VARIANT 184..187: note = any amino acid except P or G or may be absent
  VARIANT 193..196: note = any amino acid except P or G or may be absent
  VARIANT 202..205: note = any amino acid except P or G or may be absent
  VARIANT 211..214: note = any amino acid except P or G or may be absent
  VARIANT 220..223: note = any amino acid except P or G or may be absent
  VARIANT 229..232: note = any amino acid except P or G or may be absent
  VARIANT 238..241: note = any amino acid except P or G or may be absent
  VARIANT 247..250: note = any amino acid except P or G or may be absent
  VARIANT 256..259: note = any amino acid except P or G or may be absent
  VARIANT 265..268: note = any amino acid except P or G or may be absent
  VARIANT 274..277: note = any amino acid except P or G or may be absent
  VARIANT 283..286: note = any amino acid except P or G or may be absent
  VARIANT 292..295: note = any amino acid except P or G or may be absent
  VARIANT 301..304: note = any amino acid except P or G or may be absent
  VARIANT 310..313: note = any amino acid except P or G or may be absent
  VARIANT 319..322: note = any amino acid except P or G or may be absent
  VARIANT 328..331: note = any amino acid except P or G or may be absent
  VARIANT 337..340: note = any amino acid except P or G or may be absent
  VARIANT 346..349: note = any amino acid except P or G or may be absent
  VARIANT 355..358: note = any amino acid except P or G or may be absent
  VARIANT 364..367: note = any amino acid except P or G or may be absent
  VARIANT 373..376: note = any amino acid except P or G or may be absent
  VARIANT 382..385: note = any amino acid except P or G or may be absent
  VARIANT 391..394: note = any amino acid except P or G or may be absent
  VARIANT 400..403: note = any amino acid except P or G or may be absent
  VARIANT 409..412: note = any amino acid except P or G or may be absent
  VARIANT 418..421: note = any amino acid except P or G or may be absent
  VARIANT 427..430: note = any amino acid except P or G or may be absent
  VARIANT 436..439: note = any amino acid except P or G or may be absent
  VARIANT 445..448: note = any amino acid except P or G or may be absent
  VARIANT 454..457: note = any amino acid except P or G or may be absent
  VARIANT 463..466: note = any amino acid except P or G or may be absent
  VARIANT 472..475: note = any amino acid except P or G or may be absent
  VARIANT 481..484: note = any amino acid except P or G or may be absent
  VARIANT 490..493: note = any amino acid except P or G or may be absent
  VARIANT 499..502: note = any amino acid except P or G or may be absent
  VARIANT 508..511: note = any amino acid except P or G or may be absent
  VARIANT 517..520: note = any amino acid except P or G or may be absent
  VARIANT 526..529: note = any amino acid except P or G or may be absent
  VARIANT 535..538: note = any amino acid except P or G or may be absent
  VARIANT 544..547: note = any amino acid except P or G or may be absent
  VARIANT 553..556: note = any amino acid except P or G or may be absent
  VARIANT 562..565: note = any amino acid except P or G or may be absent
  VARIANT 571..574: note = any amino acid except P or G or may be absent
  VARIANT 580..583: note = any amino acid except P or G or may be absent
  VARIANT 589..592: note = any amino acid except P or G or may be absent
  VARIANT 598..601: note = any amino acid except P or G or may be absent
  VARIANT 607..610: note = any amino acid except P or G or may be absent
  VARIANT 616..619: note = any amino acid except P or G or may be absent
  VARIANT 625..628: note = any amino acid except P or G or may be absent
  VARIANT 634..637: note = any amino acid except P or G or may be absent
  VARIANT 643..646: note = any amino acid except P or G or may be absent
  VARIANT 652..655: note = any amino acid except P or G or may be absent
  VARIANT 661..664: note = any amino acid except P or G or may be absent
  VARIANT 670..673: note = any amino acid except P or G or may be absent
  VARIANT 679..682: note = any amino acid except P or G or may be absent
  VARIANT 688..691: note = any amino acid except P or G or may be absent
  VARIANT 697..700: note = any amino acid except P or G or may be absent
  VARIANT 706..709: note = any amino acid except P or G or may be absent
  VARIANT 715..718: note = any amino acid except P or G or may be absent
  VARIANT 724..727: note = any amino acid except P or G or may be absent
  VARIANT 733..736: note = any amino acid except P or G or may be absent
  VARIANT 742..745: note = any amino acid except P or G or may be absent
  VARIANT 751..754: note = any amino acid except P or G or may be absent
  VARIANT 760..763: note = any amino acid except P or G or may be absent
  VARIANT 769..772: note = any amino acid except P or G or may be absent
  VARIANT 778..781: note = any amino acid except P or G or may be absent
  VARIANT 787..790: note = any amino acid except P or G or may be absent
  VARIANT 796..799: note = any amino acid except P or G or may be absent
  VARIANT 805..808: note = any amino acid except P or G or may be absent
  VARIANT 814..817: note = any amino acid except P or G or may be absent
  VARIANT 823..826: note = any amino acid except P or G or may be absent
  VARIANT 832..835: note = any amino acid except P or G or may be absent
  VARIANT 841..844: note = any amino acid except P or G or may be absent
  VARIANT 850..853: note = any amino acid except P or G or may be absent
  VARIANT 859..862: note = any amino acid except P or G or may be absent
  VARIANT 868..871: note = any amino acid except P or G or may be absent
  VARIANT 877..880: note = any amino acid except P or G or may be absent
  VARIANT 886..889: note = any amino acid except P or G or may be absent
  VARIANT 895..898: note = any amino acid except P or G or may be absent
  VARIANT 904..907: note = any amino acid except P or G or may be absent
  VARIANT 913..916: note = any amino acid except P or G or may be absent
  VARIANT 922..925: note = any amino acid except P or G or may be absent
  VARIANT 931..934: note = any amino acid except P or G or may be absent
  VARIANT 940..943: note = any amino acid except P or G or may be absent
  VARIANT 949..952: note = any amino acid except P or G or may be absent
  VARIANT 958..961: note = any amino acid except P or G or may be absent
  VARIANT 967..970: note = any amino acid except P or G or may be absent
  VARIANT 976..979: note = any amino acid except P or G or may be absent
  VARIANT 985..988: note = any amino acid except P or G or may be absent
  VARIANT 994..997: note = any amino acid except P or G or may be absent
  VARIANT 1003..1006: note = any amino acid except P or G or may be absent
  VARIANT 1012..1015: note = any amino acid except P or G or may be absent
  VARIANT 1021..1024: note = any amino acid except P or G or may be absent
  VARIANT 1030..1033: note = any amino acid except P or G or may be absent
  VARIANT 1039..1042: note = any amino acid except P or G or may be absent
  VARIANT 1048..1051: note = any amino acid except P or G or may be absent
  VARIANT 1057..1060: note = any amino acid except P or G or may be absent
  VARIANT 1066..1069: note = any amino acid except P or G or may be absent
  VARIANT 1075..1078: note = any amino acid except P or G or may be absent
  VARIANT 1084..1087: note = any amino acid except P or G or may be absent
  VARIANT 1093..1096: note = any amino acid except P or G or may be absent
  VARIANT 1102..1105: note = any amino acid except P or G or may be absent
  VARIANT 1111..1114: note = any amino acid except P or G or may be absent
  VARIANT 1120..1123: note = any amino acid except P or G or may be absent
  VARIANT 1129..1132: note = any amino acid except P or G or may be absent
  VARIANT 1138..1141: note = any amino acid except P or G or may be absent
  VARIANT 1147..1150: note = any amino acid except P or G or may be absent
  VARIANT 1156..1159: note = any amino acid except P or G or may be absent
  VARIANT 1165..1168: note = any amino acid except P or G or may be absent
  VARIANT 1174..1177: note = any amino acid except P or G or may be absent
  VARIANT 1183..1186: note = any amino acid except P or G or may be absent
  VARIANT 1192..1195: note = any amino acid except P or G or may be absent
  VARIANT 1201..1204: note = any amino acid except P or G or may be absent
  VARIANT 1210..1213: note = any amino acid except P or G or may be absent
  VARIANT 1219..1222: note = any amino acid except P or G or may be absent
  VARIANT 1228..1231: note = any amino acid except P or G or may be absent
  VARIANT 1237..1240: note = any amino acid except P or G or may be absent
  VARIANT 1246..1249: note = any amino acid except P or G or may be absent
  VARIANT 1255..1258: note = any amino acid except P or G or may be absent
  VARIANT 1264..1267: note = any amino acid except P or G or may be absent
  VARIANT 1273..1276: note = any amino acid except P or G or may be absent
  VARIANT 1282..1285: note = any amino acid except P or G or may be absent
  VARIANT 1291..1294: note = any amino acid except P or G or may be absent
  VARIANT 1300..1303: note = any amino acid except P or G or may be absent
  VARIANT 1309..1312: note = any amino acid except P or G or may be absent
  VARIANT 1318..1321: note = any amino acid except P or G or may be absent
  VARIANT 1327..1330: note = any amino acid except P or G or may be absent
  VARIANT 1336..1339: note = any amino acid except P or G or may be absent
  VARIANT 1345..1348: note = any amino acid except P or G or may be absent
  VARIANT 1354..1357: note = any amino acid except P or G or may be absent
  VARIANT 1363..1366: note = any amino acid except P or G or may be absent
  VARIANT 1372..1375: note = any amino acid except P or G or may be absent
  VARIANT 1381..1384: note = any amino acid except P or G or may be absent
  VARIANT 1390..1393: note = any amino acid except P or G or may be absent
  VARIANT 1399..1402: note = any amino acid except P or G or may be absent
  VARIANT 1408..1411: note = any amino acid except P or G or may be absent
  VARIANT 1417..1420: note = any amino acid except P or G or may be absent
  VARIANT 1426..1429: note = any amino acid except P or G or may be absent
  VARIANT 1435..1438: note = any amino acid except P or G or may be absent
  VARIANT 1..2: note = any amino acid or may be absent
  VARIANT 9..11: note = any amino acid or may be absent
  VARIANT 18..20: note = any amino acid or may be absent
  VARIANT 27..29: note = any amino acid or may be absent
  VARIANT 36..38: note = any amino acid or may be absent
  VARIANT 45..47: note = any amino acid or may be absent
  VARIANT 54..56: note = any amino acid or may be absent
  VARIANT 63..65: note = any amino acid or may be absent
  VARIANT 72..74: note = any amino acid or may be absent
  VARIANT 81..83: note = any amino acid or may be absent
  VARIANT 90..92: note = any amino acid or may be absent
  VARIANT 99..101: note = any amino acid or may be absent
  VARIANT 108..110: note = any amino acid or may be absent
  VARIANT 117..119: note = any amino acid or may be absent
  VARIANT 126..128: note = any amino acid or may be absent
  VARIANT 135..137: note = any amino acid or may be absent
  VARIANT 144..146: note = any amino acid or may be absent
  VARIANT 153..155: note = any amino acid or may be absent
  VARIANT 162..164: note = any amino acid or may be absent
  VARIANT 171..173: note = any amino acid or may be absent
  VARIANT 180..182: note = any amino acid or may be absent
  VARIANT 189..191: note = any amino acid or may be absent
  VARIANT 198..200: note = any amino acid or may be absent
  VARIANT 207..209: note = any amino acid or may be absent
  VARIANT 216..218: note = any amino acid or may be absent
  VARIANT 225..227: note = any amino acid or may be absent
  VARIANT 234..236: note = any amino acid or may be absent
  VARIANT 243..245: note = any amino acid or may be absent
  VARIANT 252..254: note = any amino acid or may be absent
  VARIANT 261..263: note = any amino acid or may be absent
  VARIANT 270..272: note = any amino acid or may be absent
  VARIANT 279..281: note = any amino acid or may be absent
  VARIANT 288..290: note = any amino acid or may be absent
  VARIANT 297..299: note = any amino acid or may be absent
  VARIANT 306..308: note = any amino acid or may be absent
  VARIANT 315..317: note = any amino acid or may be absent
  VARIANT 324..326: note = any amino acid or may be absent
  VARIANT 333..335: note = any amino acid or may be absent
  VARIANT 342..344: note = any amino acid or may be absent
  VARIANT 351..353: note = any amino acid or may be absent
  VARIANT 360..362: note = any amino acid or may be absent
  VARIANT 369..371: note = any amino acid or may be absent
  VARIANT 378..380: note = any amino acid or may be absent
  VARIANT 387..389: note = any amino acid or may be absent
  VARIANT 396..398: note = any amino acid or may be absent
  VARIANT 405..407: note = any amino acid or may be absent
  VARIANT 414..416: note = any amino acid or may be absent
  VARIANT 423..425: note = any amino acid or may be absent
  VARIANT 432..434: note = any amino acid or may be absent
  VARIANT 441..443: note = any amino acid or may be absent
  VARIANT 450..452: note = any amino acid or may be absent
  VARIANT 459..461: note = any amino acid or may be absent
  VARIANT 468..470: note = any amino acid or may be absent
  VARIANT 477..479: note = any amino acid or may be absent
  VARIANT 486..488: note = any amino acid or may be absent
  VARIANT 495..497: note = any amino acid or may be absent
  VARIANT 504..506: note = any amino acid or may be absent
  VARIANT 513..515: note = any amino acid or may be absent
  VARIANT 522..524: note = any amino acid or may be absent
  VARIANT 531..533: note = any amino acid or may be absent
  VARIANT 540..542: note = any amino acid or may be absent
  VARIANT 549..551: note = any amino acid or may be absent
  VARIANT 558..560: note = any amino acid or may be absent
  VARIANT 567..569: note = any amino acid or may be absent
  VARIANT 576..578: note = any amino acid or may be absent
  VARIANT 585..587: note = any amino acid or may be absent
  VARIANT 594..596: note = any amino acid or may be absent
  VARIANT 603..605: note = any amino acid or may be absent
  VARIANT 612..614: note = any amino acid or may be absent
  VARIANT 621..623: note = any amino acid or may be absent
  VARIANT 630..632: note = any amino acid or may be absent
  VARIANT 639..641: note = any amino acid or may be absent
  VARIANT 648..650: note = any amino acid or may be absent
  VARIANT 657..659: note = any amino acid or may be absent
  VARIANT 666..668: note = any amino acid or may be absent
  VARIANT 675..677: note = any amino acid or may be absent
  VARIANT 684..686: note = any amino acid or may be absent
  VARIANT 693..695: note = any amino acid or may be absent
  VARIANT 702..704: note = any amino acid or may be absent
  VARIANT 711..713: note = any amino acid or may be absent
  VARIANT 720..722: note = any amino acid or may be absent
  VARIANT 729..731: note = any amino acid or may be absent
  VARIANT 738..740: note = any amino acid or may be absent
  VARIANT 747..749: note = any amino acid or may be absent
  VARIANT 756..758: note = any amino acid or may be absent
  VARIANT 765..767: note = any amino acid or may be absent
  VARIANT 774..776: note = any amino acid or may be absent
  VARIANT 783..785: note = any amino acid or may be absent
  VARIANT 792..794: note = any amino acid or may be absent
  VARIANT 801..803: note = any amino acid or may be absent
  VARIANT 810..812: note = any amino acid or may be absent
  VARIANT 819..821: note = any amino acid or may be absent
  VARIANT 828..830: note = any amino acid or may be absent
  VARIANT 837..839: note = any amino acid or may be absent
  VARIANT 846..848: note = any amino acid or may be absent
  VARIANT 855..857: note = any amino acid or may be absent
  VARIANT 864..866: note = any amino acid or may be absent
  VARIANT 873..875: note = any amino acid or may be absent
  VARIANT 882..884: note = any amino acid or may be absent
  VARIANT 891..893: note = any amino acid or may be absent
  VARIANT 900..902: note = any amino acid or may be absent
  VARIANT 909..911: note = any amino acid or may be absent
  VARIANT 918..920: note = any amino acid or may be absent
  VARIANT 927..929: note = any amino acid or may be absent
  VARIANT 936..938: note = any amino acid or may be absent
  VARIANT 945..947: note = any amino acid or may be absent
  VARIANT 954..956: note = any amino acid or may be absent
  VARIANT 963..965: note = any amino acid or may be absent
  VARIANT 972..974: note = any amino acid or may be absent
  VARIANT 981..983: note = any amino acid or may be absent
  VARIANT 990..992: note = any amino acid or may be absent
  VARIANT 999..1001: note = any amino acid or may be absent
  VARIANT 1008..1010: note = any amino acid or may be absent
  VARIANT 1017..1019: note = any amino acid or may be absent
  VARIANT 1026..1028: note = any amino acid or may be absent
  VARIANT 1035..1037: note = any amino acid or may be absent
  VARIANT 1044..1046: note = any amino acid or may be absent
  VARIANT 1053..1055: note = any amino acid or may be absent
  VARIANT 1062..1064: note = any amino acid or may be absent
  VARIANT 1071..1073: note = any amino acid or may be absent
  VARIANT 1080..1082: note = any amino acid or may be absent
  VARIANT 1089..1091: note = any amino acid or may be absent
  VARIANT 1098..1100: note = any amino acid or may be absent
  VARIANT 1107..1109: note = any amino acid or may be absent
  VARIANT 1116..1118: note = any amino acid or may be absent
  VARIANT 1125..1127: note = any amino acid or may be absent
  VARIANT 1134..1136: note = any amino acid or may be absent
  VARIANT 1143..1145: note = any amino acid or may be absent
  VARIANT 1152..1154: note = any amino acid or may be absent
  VARIANT 1161..1163: note = any amino acid or may be absent
  VARIANT 1170..1172: note = any amino acid or may be absent
  VARIANT 1179..1181: note = any amino acid or may be absent
  VARIANT 1188..1190: note = any amino acid or may be absent
  VARIANT 1197..1199: note = any amino acid or may be absent
  VARIANT 1206..1208: note = any amino acid or may be absent
  VARIANT 1215..1217: note = any amino acid or may be absent
  VARIANT 1224..1226: note = any amino acid or may be absent
  VARIANT 1233..1235: note = any amino acid or may be absent
  VARIANT 1242..1244: note = any amino acid or may be absent
  VARIANT 1251..1253: note = any amino acid or may be absent
  VARIANT 1260..1262: note = any amino acid or may be absent
  VARIANT 1269..1271: note = any amino acid or may be absent
  VARIANT 1278..1280: note = any amino acid or may be absent
  VARIANT 1287..1289: note = any amino acid or may be absent
  VARIANT 1296..1298: note = any amino acid or may be absent
  VARIANT 1305..1307: note = any amino acid or may be absent
  VARIANT 1314..1316: note = any amino acid or may be absent
  VARIANT 1323..1325: note = any amino acid or may be absent
  VARIANT 1332..1334: note = any amino acid or may be absent
  VARIANT 1341..1343: note = any amino acid or may be absent
  VARIANT 1350..1352: note = any amino acid or may be absent
  VARIANT 1359..1361: note = any amino acid or may be absent
  VARIANT 1368..1370: note = any amino acid or may be absent
  VARIANT 1377..1379: note = any amino acid or may be absent
  VARIANT 1386..1388: note = any amino acid or may be absent
  VARIANT 1395..1397: note = any amino acid or may be absent
  VARIANT 1404..1406: note = any amino acid or may be absent
  VARIANT 1413..1415: note = any amino acid or may be absent
  VARIANT 1422..1424: note = any amino acid or may be absent
  VARIANT 1431..1433: note = any amino acid or may be absent
  VARIANT 1440: note = any amino acid or may be absent
XXPXXXXGXXXPXXXXGXXXPXXXXGXXXPXXXXGXXXPXXXXGXXXPXXXXGXXXPXXXXGXXXPXXXXGXXXPXXXXGXXXPXXXXGXXXPXXXXGXXXPXXXXGXXXPXXXXGXXXPXXXXGXXXPXXXXGXXXPXXXXGXXXPXXXXGXXXPXXXXGXXXPXXXXGXXXPXXXXGXXXPXXXXGXXXPXXXXGXXXPXXXXGXXXPXXXXGXXXPXXXXGXXXPXXXXGXXXPXXXXGXXXPXXXXGXXXPXXXXGXXXPXXXXGXXXPXXXXGXXXPXXXXGXXXPXXXXGXXXPXXXXGXXXPXXXXGXXXPXXXXGXXXPXXXXGXXXPXXXXGXXXPXXXXGXXXPXXXXGXXXPXXXXGXXXPXXXXGXXXPXXXXGXXXPXXXXGXXXPXXXXGXXXPXXXXGXXXPXXXXGXXXPXXXXGXXXPXXXXGXXXPXXXXGXXXPXXXXGXXXPXXXXGXXXPXXXXGXXXPXXXXGXXXPXXXXGXXXPXXXXGXXXPXXXXGXXXPXXXXGXXXPXXXXGXXXPXXXXGXXXPXXXXGXXXPXXXXGXXXPXXXXGXXXPXXXXGXXXPXXXXGXXXPXXXXGXXXPXXXXGXXXPXXXXGXXXPXXXXGXXXPXXXXGXXXPXXXXGXXXPXXXXGXXXPXXXXGXXXPXXXXGXXXPXXXXGXXXPXXXXGXXXPXXXXGXXXPXXXXGXXXPXXXXGXXXPXXXXGXXXPXXXXGXXXPXXXXGXXXPXXXXGXXXPXXXXGXXXPXXXXGXXXPXXXXGXXXPXXXXGXXXPXXXXGXXXPXXXXGXXXPXXXXGXXXPXXXXGXXXPXXXXGXXXPXXXXGXXXPXXXXGXXXPXXXXGXXXPXXXXGXXXPXXXXGXXXPXXXXGXXXPXXXXGXXXPXXXXGXXXPXXXXGXXXPXXXXGXXXPXXXXGXXXPXXXXGXXXPXXXXGXXXPXXXXGXXXPXXXXGXXXPXXXXGXXXPXXXXGXXXPXXXXGXXXPXXXXGXXXPXXXXGXXXPXXXXGXXXPXXXXGXXXPXXXXGXXXPXXXXGXXXPXXXXGXXXPXXXXGXXXPXXXXGXXXPXXXXGXXXPXXXXGXXXPXXXXGXXXPXXXXGXXXPXXXXGXXXPXXXXGXXXPXXXXGXXXPXXXXGXXXPXXXXGXXXPXXXXGXXXPXXXXGXXXPXXXXGXXXPXXXXGXXXPXXXXGXXXPXXXXGXXXPXXXXGXXXPXXXXGXXXPXXXXGXXXPXXXXGXXXPXXXXGXXXPXXXXGXXXPXXXXGXXXPXXXXGXXXPXXXXGXXXPXXXXGXXXPXXXXGXXXPXXXXGXXXPXXXXGXXXPXXXXGXXXPXXXXGXXXPXXXXGXXXPXXXXGXXXPXXXXGXXXPXXXXGXXXPXXXXGXXXPXXXXGXXXPXXXXGXXXPXXXXGXXXPXXXXGXXXPXXXXGXXXPXXXXGX

SEQ ID NO: 24 - protein, 960 aa, synthetic construct
  REPEAT 1..6: note = single repeat of (XXPXGX)m, wherein m is an integer between 10 and 160
  VARIANT 61..960: note = up to 150 copies of (XXPXGX) can be deleted
  VARIANT 4: note = any amino acid except P or G or may be absent
  VARIANT 10: note = any amino acid except P or G or may be absent
  VARIANT 16: note = any amino acid except P or G or may be absent
  VARIANT 22: note = any amino acid except P or G or may be absent
  VARIANT 28: note = any amino acid except P or G or may be absent
  VARIANT 34: note = any amino acid except P or G or may be absent
  VARIANT 40: note = any amino acid except P or G or may be absent
  VARIANT 46: note = any amino acid except P or G or may be absent
  VARIANT 52: note = any amino acid except P or G or may be absent
  VARIANT 58: note = any amino acid except P or G or may be absent
  VARIANT 64: note = any amino acid except P or G or may be absent
  VARIANT 70: note = any amino acid except P or G or may be absent
  VARIANT 76: note = any amino acid except P or G or may be absent
  VARIANT 82: note = any amino acid except P or G or may be absent
  VARIANT 88: note = any amino acid except P or G or may be absent
  VARIANT 94: note = any amino acid except P or G or may be absent
  VARIANT 100: note = any amino acid except P or G or may be absent
  VARIANT 106: note = any amino acid except P or G or may be absent
  VARIANT 112: note = any amino acid except P or G or may be absent
  VARIANT 118: note = any amino acid except P or G or may be absent
  VARIANT 124: note = any amino acid except P or G or may be absent
  VARIANT 130: note = any amino acid except P or G or may be absent
  VARIANT 136: note = any amino acid except P or G or may be absent
  VARIANT 142: note = any amino acid except P or G or may be absent
  VARIANT 148: note = any amino acid except P or G or may be absent
  VARIANT 154: note = any amino acid except P or G or may be absent
  VARIANT 160: note = any amino acid except P or G or may be absent
  VARIANT 166: note = any amino acid except P or G or may be absent
  VARIANT 172: note = any amino acid except P or G or may be absent
  VARIANT 178: note = any amino acid except P or G or may be absent
  VARIANT 184: note = any amino acid except P or G or may be absent
  VARIANT 190: note = any amino acid except P or G or may be absent
  VARIANT 196: note = any amino acid except P or G or may be absent
  VARIANT 202: note = any amino acid except P or G or may be absent
  VARIANT 208: note = any amino acid except P or G or may be absent
  VARIANT 214: note = any amino acid except P or G or may be absent
  VARIANT 220: note = any amino acid except P or G or may be absent
  VARIANT 226: note = any amino acid except P or G or may be absent
  VARIANT 232: note = any amino acid except P or G or may be absent
  VARIANT 238: note = any amino acid except P or G or may be absent
  VARIANT 244: note = any amino acid except P or G or may be absent
  VARIANT 250: note = any amino acid except P or G or may be absent
  VARIANT 256: note = any amino acid except P or G or may be absent
  VARIANT 262: note = any amino acid except P or G or may be absent
  VARIANT 268: note = any amino acid except P or G or may be absent
  VARIANT 274: note = any amino acid except P or G or may be absent
  VARIANT 280: note = any amino acid except P or G or may be absent
  VARIANT 286: note = any amino acid except P or G or may be absent
  VARIANT 292: note = any amino acid except P or G or may be absent
  VARIANT 298: note = any amino acid except P or G or may be absent
  VARIANT 304: note = any amino acid except P or G or may be absent
  VARIANT 310: note = any amino acid except P or G or may be absent
  VARIANT 316: note = any amino acid except P or G or may be absent
  VARIANT 322: note = any amino acid except P or G or may be absent
  VARIANT 328: note = any amino acid except P or G or may be absent
  VARIANT 334: note = any amino acid except P or G or may be absent
  VARIANT 340: note = any amino acid except P or G or may be absent
  VARIANT 346: note = any amino acid except P or G or may be absent
  VARIANT 352: note = any amino acid except P or G or may be absent
  VARIANT 358: note = any amino acid except P or G or may be absent
  VARIANT 364: note = any amino acid except P or G or may be absent
  VARIANT 370: note = any amino acid except P or G or may be absent
  VARIANT 376: note = any amino acid except P or G or may be absent
  VARIANT 382: note = any amino acid except P or G or may be absent
  VARIANT 388: note = any amino acid except P or G or may be absent
  VARIANT 394: note = any amino acid except P or G or may be absent
  VARIANT 400: note = any amino acid except P or G or may be absent
  VARIANT 406: note = any amino acid except P or G or may be absent
  VARIANT 412: note = any amino acid except P or G or may be absent
  VARIANT 418: note = any amino acid except P or G or may be absent
  VARIANT 424: note = any amino acid except P or G or may be absent
  VARIANT 430: note = any amino acid except P or G or may be absent
  VARIANT 436: note = any amino acid except P or G or may be absent
  VARIANT 442: note = any amino acid except P or G or may be absent
  VARIANT 448: note = any amino acid except P or G or may be absent
  VARIANT 454: note = any amino acid except P or G or may be absent
  VARIANT 460: note = any amino acid except P or G or may be absent
  VARIANT 466: note = any amino acid except P or G or may be absent
  VARIANT 472: note = any amino acid except P or G or may be absent
  VARIANT 478: note = any amino acid except P or G or may be absent
  VARIANT 484: note = any amino acid except P or G or may be absent
  VARIANT 490: note = any amino acid except P or G or may be absent
  VARIANT 496: note = any amino acid except P or G or may be absent
  VARIANT 502: note = any amino acid except P or G or may be absent
  VARIANT 508: note = any amino acid except P or G or may be absent
  VARIANT 514: note = any amino acid except P or G or may be absent
  VARIANT 520: note = any amino acid except P or G or may be absent
  VARIANT 526: note = any amino acid except P or G or may be absent
  VARIANT 532: note = any amino acid except P or G or may be absent
  VARIANT 538: note = any amino acid except P or G or may be absent
  VARIANT 544: note = any amino acid except P or G or may be absent
  VARIANT 550: note = any amino acid except P or G or may be absent
  VARIANT 556: note = any amino acid except P or G or may be absent
  VARIANT 562: note = any amino acid except P or G or may be absent
  VARIANT 568: note = any amino acid except P or G or may be absent
  VARIANT 574: note = any amino acid except P or G or may be absent
  VARIANT 580: note = any amino acid except P or G or may be absent
  VARIANT 586: note = any amino acid except P or G or may be absent
  VARIANT 592: note = any amino acid except P or G or may be absent
  VARIANT 598: note = any amino acid except P or G or may be absent
  VARIANT 604: note = any amino acid except P or G or may be absent
  VARIANT 610: note = any amino acid except P or G or may be absent
  VARIANT 616: note = any amino acid except P or G or may be absent
  VARIANT 622: note = any amino acid except P or G or may be absent
  VARIANT 628: note = any amino acid except P or G or may be absent
  VARIANT 634: note = any amino acid except P or G or may be absent
  VARIANT 640: note = any amino acid except P or G or may be absent
  VARIANT 646: note = any amino acid except P or G or may be absent
  VARIANT 652: note = any amino acid except P or G or may be absent
  VARIANT 658: note = any amino acid except P or G or may be absent
  VARIANT 664: note = any amino acid except P or G or may be absent
  VARIANT 670: note = any amino acid except P or G or may be absent
  VARIANT 676: note = any amino acid except P or G or may be absent
  VARIANT 682: note = any amino acid except P or G or may be absent
  VARIANT 688: note = any amino acid except P or G or may be absent
  VARIANT 694: note = any amino acid except P or G or may be absent
  VARIANT 700: note = any amino acid except P or G or may be absent
  VARIANT 706: note = any amino acid except P or G or may be absent
  VARIANT 712: note = any amino acid except P or G or may be absent
  VARIANT 718: note = any amino acid except P or G or may be absent
  VARIANT 724: note = any amino acid except P or G or may be absent
  VARIANT 730: note = any amino acid except P or G or may be absent
  VARIANT 736: note = any amino acid except P or G or may be absent
  VARIANT 742: note = any amino acid except P or G or may be absent
  VARIANT 748: note = any amino acid except P or G or may be absent
  VARIANT 754: note = any amino acid except P or G or may be absent
  VARIANT 760: note = any amino acid except P or G or may be absent
  VARIANT 766: note = any amino acid except P or G or may be absent
  VARIANT 772: note = any amino acid except P or G or may be absent
  VARIANT 778: note = any amino acid except P or G or may be absent
  VARIANT 784: note = any amino acid except P or G or may be absent
  VARIANT 790: note = any amino acid except P or G or may be absent
  VARIANT 796: note = any amino acid except P or G or may be absent
  VARIANT 802: note = any amino acid except P or G or may be absent
  VARIANT 808: note = any amino acid except P or G or may be absent
  VARIANT 814: note = any amino acid except P or G or may be absent
  VARIANT 820: note = any amino acid except P or G or may be absent
  VARIANT 826: note = any amino acid except P or G or may be absent
  VARIANT 832: note = any amino acid except P or G or may be absent
  VARIANT 838: note = any amino acid except P or G or may be absent
  VARIANT 844: note = any amino acid except P or G or may be absent
  VARIANT 850: note = any amino acid except P or G or may be absent
  VARIANT 856: note = any amino acid except P or G or may be absent
  VARIANT 862: note = any amino acid except P or G or may be absent
  VARIANT 868: note = any amino acid except P or G or may be absent
  VARIANT 874: note = any amino acid except P or G or may be absent
  VARIANT 880: note = any amino acid except P or G or may be absent
  VARIANT 886: note = any amino acid except P or G or may be absent
  VARIANT 892: note = any amino acid except P or G or may be absent
  VARIANT 898: note = any amino acid except P or G or may be absent
  VARIANT 904: note = any amino acid except P or G or may be absent
  VARIANT 910: note = any amino acid except P or G or may be absent
  VARIANT 916: note = any amino acid except P or G or may be absent
  VARIANT 922: note = any amino acid except P or G or may be absent
  VARIANT 928: note = any amino acid except P or G or may be absent
  VARIANT 934: note = any amino acid except P or G or may be absent
  VARIANT 940: note = any amino acid except P or G or may be absent
  VARIANT 946: note = any amino acid except P or G or may be absent
  VARIANT 952: note = any amino acid except P or G or may be absent
  VARIANT 958: note = any amino acid except P or G or may be absent
  VARIANT 1..2: note = any amino acid or may be absent
  VARIANT 6..8: note = any amino acid or may be absent
  VARIANT 12..14: note = any amino acid or may be absent
  VARIANT 18..20: note = any amino acid or may be absent
  VARIANT 24..26: note = any amino acid or may be absent
  VARIANT 30..32: note = any amino acid or may be absent
  VARIANT 36..38: note = any amino acid or may be absent
  VARIANT 42..44: note = any amino acid or may be absent
  VARIANT 48..50: note = any amino acid or may be absent
  VARIANT 54..56: note = any amino acid or may be absent
  VARIANT 60..62: note = any amino acid or may be absent
  VARIANT 66..68: note = any amino acid or may be absent
  VARIANT 72..74: note = any amino acid or may be absent
  VARIANT 78..80: note = any amino acid or may be absent
  VARIANT 84..86: note = any amino acid or may be absent
  VARIANT 90..92: note = any amino acid or may be absent
  VARIANT 96..98: note = any amino acid or may be absent
  VARIANT 102..104: note = any amino acid or may be absent
  VARIANT 108..110: note = any amino acid or may be absent
  VARIANT 114..116: note = any amino acid or may be absent
  VARIANT 120..122: note = any amino acid or may be absent
  VARIANT 126..128: note = any amino acid or may be absent
  VARIANT 132..134: note = any amino acid or may be absent
  VARIANT 138..140: note = any amino acid or may be absent
  VARIANT 144..146: note = any amino acid or may be absent
  VARIANT 150..152: note = any amino acid or may be absent
  VARIANT 156..158: note = any amino acid or may be absent
  VARIANT 162..164: note = any amino acid or may be absent
  VARIANT 168..170: note = any amino acid or may be absent
  VARIANT 174..176: note = any amino acid or may be absent
  VARIANT 180..182: note = any amino acid or may be absent
  VARIANT 186..188: note = any amino acid or may be absent
  VARIANT 192..194: note = any amino acid or may be absent
  VARIANT 198..200: note = any amino acid or may be absent
  VARIANT 204..206: note = any amino acid or may be absent
  VARIANT 210..212: note = any amino acid or may be absent
  VARIANT 216..218: note = any amino acid or may be absent
  VARIANT 222..224: note = any amino acid or may be absent
  VARIANT 228..230: note = any amino acid or may be absent
  VARIANT 234..236: note = any amino acid or may be absent
  VARIANT 240..242: note = any amino acid or may be absent
  VARIANT 246..248: note = any amino acid or may be absent
  VARIANT 252..254: note = any amino acid or may be absent
  VARIANT 258..260: note = any amino acid or may be absent
  VARIANT 264..266: note = any amino acid or may be absent
  VARIANT 270..272: note = any amino acid or may be absent
  VARIANT 276..278: note = any amino acid or may be absent
  VARIANT 282..284: note = any amino acid or may be absent
  VARIANT 288..290: note = any amino acid or may be absent
  VARIANT 294..296: note = any amino acid or may be absent
  VARIANT 300..302: note = any amino acid or may be absent
  VARIANT 306..308: note = any amino acid or may be absent
  VARIANT 312..314: note = any amino acid or may be absent
  VARIANT 318..320: note = any amino acid or may be absent
  VARIANT 324..326: note = any amino acid or may be absent
  VARIANT 330..332: note = any amino acid or may be absent
  VARIANT 336..338: note = any amino acid or may be absent
  VARIANT 342..344: note = any amino acid or may be absent
  VARIANT 348..350: note = any amino acid or may be absent
  VARIANT 354..356: note = any amino acid or may be absent
  VARIANT 360..362: note = any amino acid or may be absent
  VARIANT 366..368: note = any amino acid or may be absent
  VARIANT 372..374: note = any amino acid or may be absent
  VARIANT 378..380: note = any amino acid or may be absent
  VARIANT 384..386: note = any amino acid or may be absent
  VARIANT 390..392: note = any amino acid or may be absent
  VARIANT 396..398: note = any amino acid or may be absent
  VARIANT 402..404: note = any amino acid or may be absent
  VARIANT 408..410: note = any amino acid or may be absent
  VARIANT 414..416: note = any amino acid or may be absent
  VARIANT 420..422: note = any amino acid or may be absent
  VARIANT 426..428: note = any amino acid or may be absent
  VARIANT 432..434: note = any amino acid or may be absent
  VARIANT 438..440: note = any amino acid or may be absent
  VARIANT 444..446: note = any amino acid or may be absent
  VARIANT 450..452: note = any amino acid or may be absent
  VARIANT 456..458: note = any amino acid or may be absent
  VARIANT 462..464: note = any amino acid or may be absent
  VARIANT 468..470: note = any amino acid or may be absent
  VARIANT 474..476: note = any amino acid or may be absent
  VARIANT 480..482: note = any amino acid or may be absent
  VARIANT 486..488: note = any amino acid or may be absent
  VARIANT 492..494: note = any amino acid or may be absent
  VARIANT 498..500: note = any amino acid or may be absent
  VARIANT 504..506: note = any amino acid or may be absent
  VARIANT 510..512: note = any amino acid or may be absent
  VARIANT 516..518: note = any amino acid or may be absent
  VARIANT 522..524: note = any amino acid or may be absent
  VARIANT 528..530: note = any amino acid or may be absent
  VARIANT 534..536: note = any amino acid or may be absent
  VARIANT 540..542: note = any amino acid or may be absent
  VARIANT 546..548: note = any amino acid or may be absent
  VARIANT 552..554: note = any amino acid or may be absent
  VARIANT 558..560: note = any amino acid or may be absent
  VARIANT 564..566: note = any amino acid or may be absent
  VARIANT 570..572: note = any amino acid or may be absent
  VARIANT 576..578: note = any amino acid or may be absent
  VARIANT 582..584: note = any amino acid or may be absent
  VARIANT 588..590: note = any amino acid or may be absent
  VARIANT 594..596: note = any amino acid or may be absent
  VARIANT 600..602: note = any amino acid or may be absent
  VARIANT 606..608: note = any amino acid or may be absent
  VARIANT 612..614: note = any amino acid or may be absent
  VARIANT 618..620: note = any amino acid or may be absent
  VARIANT 624..626: note = any amino acid or may be absent
  VARIANT 630..632: note = any amino acid or may be absent
  VARIANT 636..638: note = any amino acid or may be absent
  VARIANT 642..644: note = any amino acid or may be absent
  VARIANT 648..650: note = any amino acid or may be absent
  VARIANT 654..656: note = any amino acid or may be absent
  VARIANT 660..662: note = any amino acid or may be absent
  VARIANT 666..668: note = any amino acid or may be absent
  VARIANT 672..674: note = any amino acid or may be absent
  VARIANT 678..680: note = any amino acid or may be absent
  VARIANT 684..686: note = any amino acid or may be absent
  VARIANT 690..692: note = any amino acid or may be absent
  VARIANT 696..698: note = any amino acid or may be absent
  VARIANT 702..704: note = any amino acid or may be absent
  VARIANT 708..710: note = any amino acid or may be absent
  VARIANT 714..716: note = any amino acid or may be absent
  VARIANT 720..722: note = any amino acid or may be absent
  VARIANT 726..728: note = any amino acid or may be absent
  VARIANT 732..734: note = any amino acid or may be absent
  VARIANT 738..740: note = any amino acid or may be absent
  VARIANT 744..746: note = any amino acid or may be absent
  VARIANT 750..752: note = any amino acid or may be absent
  VARIANT 756..758: note = any amino acid or may be absent
  VARIANT 762..764: note = any amino acid or may be absent
  VARIANT 768..770: note = any amino acid or may be absent
  VARIANT 774..776: note = any amino acid or may be absent
  VARIANT 780..782: note = any amino acid or may be absent
  VARIANT 786..788: note = any amino acid or may be absent
  VARIANT 792..794: note = any amino acid or may be absent
  VARIANT 798..800: note = any amino acid or may be absent
  VARIANT 804..806: note = any amino acid or may be absent
  VARIANT 810..812: note = any amino acid or may be absent
  VARIANT 816..818: note = any amino acid or may be absent
  VARIANT 822..824: note = any amino acid or may be absent
  VARIANT 828..830: note = any amino acid or may be absent
  VARIANT 834..836: note = any amino acid or may be absent
  VARIANT 840..842: note = any amino acid or may be absent
  VARIANT 846..848: note = any amino acid or may be absent
  VARIANT 852..854: note = any amino acid or may be absent
  VARIANT 858..860: note = any amino acid or may be absent
  VARIANT 864..866: note = any amino acid or may be absent
  VARIANT 870..872: note = any amino acid or may be absent
  VARIANT 876..878: note = any amino acid or may be absent
  VARIANT 882..884: note = any amino acid or may be absent
  VARIANT 888..890: note = any amino acid or may be absent
  VARIANT 894..896: note = any amino acid or may be absent
  VARIANT 900..902: note = any amino acid or may be absent
  VARIANT 906..908: note = any amino acid or may be absent
  VARIANT 912..914: note = any amino acid or may be absent
  VARIANT 918..920: note = any amino acid or may be absent
  VARIANT 924..926: note = any amino acid or may be absent
  VARIANT 930..932: note = any amino acid or may be absent
  VARIANT 936..938: note = any amino acid or may be absent
  VARIANT 942..944: note = any amino acid or may be absent
  VARIANT 948..950: note = any amino acid or may be absent
  VARIANT 954..956: note = any amino acid or may be absent
  VARIANT 960: note = any amino acid or may be absent
XXPXGXXXPXGXXXPXGXXXPXGXXXPXGXXXPXGXXXPXGXXXPXGXXXPXGXXXPXGXXXPXGXXXPXGXXXPXGXXXPXGXXXPXGXXXPXGXXXPXGXXXPXGXXXPXGXXXPXGXXXPXGXXXPXGXXXPXGXXXPXGXXXPXGXXXPXGXXXPXGXXXPXGXXXPXGXXXPXGXXXPXGXXXPXGXXXPXGXXXPXGXXXPXGXXXPXGXXXPXGXXXPXGXXXPXGXXXPXGXXXPXGXXXPXGXXXPXGXXXPXGXXXPXGXXXPXGXXXPXGXXXPXGXXXPXGXXXPXGXXXPXGXXXPXGXXXPXGXXXPXGXXXPXGXXXPXGXXXPXGXXXPXGXXXPXGXXXPXGXXXPXGXXXPXGXXXPXGXXXPXGXXXPXGXXXPXGXXXPXGXXXPXGXXXPXGXXXPXGXXXPXGXXXPXGXXXPXGXXXPXGXXXPXGXXXPXGXXXPXGXXXPXGXXXPXGXXXPXGXXXPXGXXXPXGXXXPXGXXXPXGXXXPXGXXXPXGXXXPXGXXXPXGXXXPXGXXXPXGXXXPXGXXXPXGXXXPXGXXXPXGXXXPXGXXXPXGXXXPXGXXXPXGXXXPXGXXXPXGXXXPXGXXXPXGXXXPXGXXXPXGXXXPXGXXXPXGXXXPXGXXXPXGXXXPXGXXXPXGXXXPXGXXXPXGXXXPXGXXXPXGXXXPXGXXXPXGXXXPXGXXXPXGXXXPXGXXXPXGXXXPXGXXXPXGXXXPXGXXXPXGXXXPXGXXXPXGXXXPXGXXXPXGXXXPXGXXXPXGXXXPXGXXXPXGXXXPXGXXXPXGXXXPXGXXXPXGXXXPXGXXXPXGXXXPXGXXXPXGXXXPXGXXXPXGXXXPXGXXXPXGXXXPXGXXXPXGXXXPXGXXXPXGXXXPXGXXXPXGXXXPXGXXXPXGXXXPXGXXXPXGXXXPXGXXXPXGXXXPXGXXXPXGXXXPXGXXXPXGX

SEQ ID NO: 25 - protein, 1120 aa, synthetic construct
  REPEAT 1..7: note = single repeat of (XXPXXGX)m, wherein m is an integer between 10 and 160
  VARIANT 71..1120: note = up to 150 copies of (XXPXXGX) can be deleted
  VARIANT 4..5: note = any amino acid except P or G or may be absent
  VARIANT 11..12: note = any amino acid except P or G or may be absent
  VARIANT 18..19: note = any amino acid except P or G or may be absent
  VARIANT 25..26: note = any amino acid except P or G or may be absent
  VARIANT 32..33: note = any amino acid except P or G or may be absent
  VARIANT 39..40: note = any amino acid except P or G or may be absent
  VARIANT 46..47: note = any amino acid except P or G or may be absent
  VARIANT 53..54: note = any amino acid except P or G or may be absent
  VARIANT 60..61: note = any amino acid except P or G or may be absent
  VARIANT 67..68: note = any amino acid except P or G or may be absent
  VARIANT 74..75: note = any amino acid except P or G or may be absent
  VARIANT 81..82: note = any amino acid except P or G or may be absent
  VARIANT 88..89: note = any amino acid except P or G or may be absent
  VARIANT 95..96: note = any amino acid except P or G or may be absent
  VARIANT 102..103: note = any amino acid except P or G or may be absent
  VARIANT 109..110: note = any amino acid except P or G or may be absent
  VARIANT 116..117: note = any amino acid except P or G or may be absent
  VARIANT 123..124: note = any amino acid except P or G or may be absent
  VARIANT 130..131: note = any amino acid except P or G or may be absent
  VARIANT 137..138: note = any amino acid except P or G or may be absent
  VARIANT 144..145: note = any amino acid except P or G or may be absent
  VARIANT 151..152: note = any amino acid except P or G or may be absent
  VARIANT 158..159: note = any amino acid except P or G or may be absent
  VARIANT 165..166: note = any amino acid except P or G or may be absent
  VARIANT 172..173: note = any amino acid except P or G or may be absent
  VARIANT 179..180: note = any amino acid except P or G or may be absent
  VARIANT 186..187: note = any amino acid except P or G or may be absent
  VARIANT 193..194: note = any amino acid except P or G or may be absent
  VARIANT 200..201: note = any amino acid except P or G or may be absent
  VARIANT 207..208: note = any amino acid except P or G or may be absent
  VARIANT 214..215: note = any amino acid except P or G or may be absent
  VARIANT 221..222: note = any amino acid except P or G or may be absent
  VARIANT 228..229: note = any amino acid except P or G or may be absent
  VARIANT 235..236: note = any amino acid except P or G or may be absent
  VARIANT 242..243: note = any amino acid except P or G or may be absent
  VARIANT 249..250: note = any amino acid except P or G or may be absent
  VARIANT 256..257: note = any amino acid except P or G or may be absent
  VARIANT 263..264: note = any amino acid except P or G or may be absent
  VARIANT 270..271: note = any amino acid except P or G or may be absent
  VARIANT 277..278: note = any amino acid except P or G or may be absent
  VARIANT 284..285: note = any amino acid except P or G or may be absent
  VARIANT 291..292: note = any amino acid except P or G or may be absent
  VARIANT 298..299: note = any amino acid except P or G or may be absent
  VARIANT 305..306: note = any amino acid except P or G or may be absent
  VARIANT 312..313: note = any amino acid except P or G or may be absent
  VARIANT 319..320: note = any amino acid except P or G or may be absent
  VARIANT 326..327: note = any amino acid except P or G or may be absent
  VARIANT 333..334: note = any amino acid except P or G or may be absent
  VARIANT 340..341: note = any amino acid except P or G or may be absent
  VARIANT 347..348: note = any amino acid except P or G or may be absent
  VARIANT 354..355: note = any amino acid except P or G or may be absent
  VARIANT 361..362: note = any amino acid except P or G or may be absent
  VARIANT 368..369: note = any amino acid except P or G or may be absent
  VARIANT 375..376: note = any amino acid except P or G or may be absent
  VARIANT 382..383: note = any amino acid except P or G or may be absent
  VARIANT 389..390: note = any amino acid except P or G or may be absent
  VARIANT 396..397: note = any amino acid except P or G or may be absent
  VARIANT 403..404: note = any amino acid except P or G or may be absent
  VARIANT 410..411: note = any amino acid except P or G or may be absent
  VARIANT 417..418: note = any amino acid except P or G or may be absent
  VARIANT 424..425: note = any amino acid except P or G or may be absent
  VARIANT 431..432: note = any amino acid except P or G or may be absent
  VARIANT 438..439: note = any amino acid except P or G or may be absent
  VARIANT 445..446: note = any amino acid except P or G or may be absent
  VARIANT 452..453: note = any amino acid except P or G or may be absent
  VARIANT 459..460: note = any amino acid except P or G or may be absent
  VARIANT 466..467: note = any amino acid except P or G or may be absent
  VARIANT 473..474: note = any amino acid except P or G or may be absent
  VARIANT 480..481: note = any amino acid except P or G or may be absent
  VARIANT 487..488: note = any amino acid except P or G or may be absent
  VARIANT 494..495: note = any amino acid except P or G or may be absent
  VARIANT 501..502: note = any amino acid except P or G or may be absent
  VARIANT 508..509: note = any amino acid except P or G or may be absent
  VARIANT 515..516: note = any amino acid except P or G or may be absent
  VARIANT 522..523: note = any amino acid except P or G or may be absent
  VARIANT 529..530: note = any amino acid except P or G or may be absent
  VARIANT 536..537: note = any amino acid except P or G or may be absent
  VARIANT 543..544: note = any amino acid except P or G or may be absent
  VARIANT 550..551: note = any amino acid except P or G or may be absent
  VARIANT 557..558: note = any amino acid except P or G or may be absent
  VARIANT 564..565: note = any amino acid except P or G or may be absent
  VARIANT 571..572: note = any amino acid except P or G or may be absent
  VARIANT 578..579: note = any amino acid except P or G or may be absent
  VARIANT 585..586: note = any amino acid except P or G or may be absent
  VARIANT 592..593: note = any amino acid except P or G or may be absent
  VARIANT 599..600: note = any amino acid except P or G or may be absent
  VARIANT 606..607: note = any amino acid except P or G or may be absent
  VARIANT 613..614: note = any amino acid except P or G or may be absent
  VARIANT 620..621: note = any amino acid except P or G or may be absent
  VARIANT 627..628: note = any amino acid except P or G or may be absent
  VARIANT 634..635: note = any amino acid except P or G or may be absent
  VARIANT 641..642: note = any amino acid except P or G or may be absent
  VARIANT 648..649: note = any amino acid except P or G or may be absent
  VARIANT 655..656: note = any amino acid except P or G or may be absent
  VARIANT 662..663: note = any amino acid except P or G or may be absent
  VARIANT 669..670: note = any amino acid except P or G or may be absent
  VARIANT 676..677: note = any amino acid except P or G or may be absent
  VARIANT 683..684: note = any amino acid except P or G or may be absent
  VARIANT 690..691: note = any amino acid except P or G or may be absent
  VARIANT 697..698: note = any amino acid except P or G or may be absent
  VARIANT 704..705: note = any amino acid except P or G or may be absent
  VARIANT 711..712: note = any amino acid except P or G or may be absent
  VARIANT 718..719: note = any amino acid except P or G or may be absent
  VARIANT 725..726: note = any amino acid except P or G or may be absent
  VARIANT 732..733: note = any amino acid except P or G or may be absent
  VARIANT 739..740: note = any amino acid except P or G or may be absent
  VARIANT 746..747: note = any amino acid except P or G or may be absent
  VARIANT 753..754: note = any amino acid except P or G or may be absent
  VARIANT 760..761: note = any amino acid except P or G or may be absent
  VARIANT 767..768: note = any amino acid except P or G or may be absent
  VARIANT 774..775: note = any amino acid except P or G or may be absent
  VARIANT 781..782: note = any amino acid except P or G or may be absent
  VARIANT 788..789: note = any amino acid except P or G or may be absent
  VARIANT 795..796: note = any amino acid except P or G or may be absent
  VARIANT 802..803: note = any amino acid except P or G or may be absent
  VARIANT 809..810: note = any amino acid except P or G or may be absent
  VARIANT 816..817: note = any amino acid except P or G or may be absent
  VARIANT 823..824: note = any amino acid except P or G or may be absent
  VARIANT 830..831: note = any amino acid except P or G or may be absent
  VARIANT 837..838: note = any amino acid except P or G or may be absent
  VARIANT 844..845: note = any amino acid except P or G or may be absent
  VARIANT 851..852: note = any amino acid except P or G or may be absent
  VARIANT 858..859: note = any amino acid except P or G or may be absent
  VARIANT 865..866: note = any amino acid except P or G or may be absent
  VARIANT 872..873: note = any amino acid except P or G or may be absent
  VARIANT 879..880: note = any amino acid except P or G or may be absent
  VARIANT 886..887: note = any amino acid except P or G or may be absent
  VARIANT 893..894: note = any amino acid except P or G or may be absent
  VARIANT 900..901: note = any amino acid except P or G or may be absent
  VARIANT 907..908: note = any amino acid except P or G or may be absent
  VARIANT 914..915: note = any amino acid except P or G or may be absent
  VARIANT 921..922: note = any amino acid except P or G or may be absent
  VARIANT 928..929: note = any amino acid except P or G or may be absent
  VARIANT 935..936: note = any amino acid except P or G or may be absent
  VARIANT 942..943: note = any amino acid except P or G or may be absent
  VARIANT 949..950: note = any amino acid except P or G or may be absent
  VARIANT 956..957: note = any amino acid except P or G or may be absent
  VARIANT 963..964: note = any amino acid except P or G or may be absent
  VARIANT 970..971: note = any amino acid except P or G or may be absent
  VARIANT 977..978: note = any amino acid except P or G or may be absent
  VARIANT 984..985: note = any amino acid except P or G or may be absent
  VARIANT 991..992: note = any amino acid except P or G or may be absent
  VARIANT 998..999: note = any amino acid except P or G or may be absent
  VARIANT 1005..1006: note = any amino acid except P or G or may be absent
  VARIANT 1012..1013: note = any amino acid except P or G or may be absent
  VARIANT 1019..1020: note = any amino acid except P or G or may be absent
  VARIANT 1026..1027: note = any amino acid except P or G or may be absent
  VARIANT 1033..1034: note = any amino acid except P or G or may be absent
  VARIANT 1040..1041: note = any amino acid except P or G or may be absent
  VARIANT 1047..1048: note = any amino acid except P or G or may be absent
  VARIANT 1054..1055: note = any amino acid except P or G or may be absent
  VARIANT 1061..1062: note = any amino acid except P or G or may be absent
  VARIANT 1068..1069: note = any amino acid except P or G or may be absent
  VARIANT 1075..1076: note = any amino acid except P or G or may be absent
  VARIANT 1082..1083: note = any amino acid except P or G or may be absent
  VARIANT 1089..1090: note = any amino acid except P or G or may be absent
  VARIANT 1096..1097: note = any amino acid except P or G or may be absent
  VARIANT 1103..1104: note = any amino acid except P or G or may be absent
  VARIANT 1110..1111: note = any amino acid except P or G or may be absent
  VARIANT 1117..1118: note = any amino acid except P or G or may be absent
  VARIANT 1..2: note = any amino acid or may be absent
  VARIANT 7..9: note = any amino acid or may be absent
  VARIANT 14..16: note = any amino acid or may be absent
  VARIANT 21..23: note = any amino acid or may be absent
  VARIANT 28..30: note = any amino acid or may be absent
  VARIANT 35..37: note = any amino acid or may be absent
  VARIANT 42..44: note = any amino acid or may be absent
  VARIANT 49..51: note = any amino acid or may be absent
  VARIANT 56..58: note = any amino acid or may be absent
  VARIANT 63..65: note = any amino acid or may be absent
  VARIANT 70..72: note = any amino acid or may be absent
  VARIANT 77..79: note = any amino acid or may be absent
  VARIANT 84..86: note = any amino acid or may be absent
  VARIANT 91..93: note = any amino acid or may be absent
  VARIANT 98..100: note = any amino acid or may be absent
  VARIANT 105..107: note = any amino acid or may be absent
  VARIANT 112..114: note = any amino acid or may be absent
  VARIANT 119..121: note = any amino acid or may be absent
  VARIANT 126..128: note = any amino acid or may be absent
  VARIANT 133..135: note = any amino acid or may be absent
  VARIANT 140..142: note = any amino acid or may be absent
  VARIANT 147..149: note = any amino acid or may be absent
  VARIANT 154..156: note = any amino acid or may be absent
  VARIANT 161..163: note = any amino acid or may be absent
  VARIANT 168..170: note = any amino acid or may be absent
  VARIANT 175..177: note = any amino acid or may be absent
  VARIANT 182..184: note = any amino acid or may be absent
  VARIANT 189..191: note = any amino acid or may be absent
  VARIANT 196..198: note = any amino acid or may be absent
  VARIANT 203..205: note = any amino acid or may be absent
  VARIANT 210..212: note = any amino acid or may be absent
  VARIANT 217..219: note = any amino acid or may be absent
  VARIANT 224..226: note = any amino acid or may be absent
  VARIANT 231..233: note = any amino acid or may be absent
  VARIANT 238..240: note = any amino acid or may be absent
  VARIANT 245..247: note = any amino acid or may be absent
  VARIANT 252..254: note = any amino acid or may be absent
  VARIANT 259..261: note = any amino acid or may be absent
  VARIANT 266..268: note = any amino acid or may be absent
  VARIANT 273..275: note = any amino acid or may be absent
  VARIANT 280..282: note = any amino acid or may be absent
  VARIANT 287..289: note = any amino acid or may be absent
  VARIANT 294..296: note = any amino acid or may be absent
  VARIANT 301..303: note = any amino acid or may be absent
  VARIANT 308..310: note = any amino acid or may be absent
  VARIANT 315..317: note = any amino acid or may be absent
  VARIANT 322..324: note = any amino acid or may be absent
  VARIANT 329..331: note = any amino acid or may be absent
  VARIANT 336..338: note = any amino acid or may be absent
  VARIANT 343..345: note = any amino acid or may be absent
  VARIANT 350..352: note = any amino acid or may be absent
  VARIANT 357..359: note = any amino acid or may be absent
  VARIANT 364..366: note = any amino acid or may be absent
  VARIANT 371..373: note = any amino acid or may be absent
  VARIANT 378..380: note = any amino acid or may be absent
  VARIANT 385..387: note = any amino acid or may be absent
  VARIANT 392..394: note = any amino acid or may be absent
  VARIANT 399..401: note = any amino acid or may be absent
  VARIANT 406..408: note = any amino acid or may be absent
  VARIANT 413..415: note = any amino acid or may be absent
  VARIANT 420..422: note = any amino acid or may be absent
  VARIANT 427..429: note = any amino acid or may be absent
  VARIANT 434..436: note = any amino acid or may be absent
  VARIANT 441..443: note = any amino acid or may be absent
  VARIANT 448..450: note = any amino acid or may be absent
  VARIANT 455..457: note = any amino acid or may be absent
  VARIANT 462..464: note = any amino acid or may be absent
  VARIANT 469..471: note = any amino acid or may be absent
  VARIANT 476..478: note = any amino acid or may be absent
  VARIANT 483..485: note = any amino acid or may be absent
  VARIANT 490..492: note = any amino acid or may be absent
  VARIANT 497..499: note = any amino acid or may be absent
  VARIANT 504..506: note = any amino acid or may be absent
  VARIANT 511..513: note = any amino acid or may be absent
  VARIANT 518..520: note = any amino acid or may be absent
  VARIANT 525..527: note = any amino acid or may be absent
  VARIANT 532..534: note = any amino acid or may be absent
  VARIANT 539..541: note = any amino acid or may be absent
  VARIANT 546..548: note = any amino acid or may be absent
  VARIANT 553..555: note = any amino acid or may be absent
  VARIANT 560..562: note = any amino acid or may be absent
  VARIANT 567..569: note = any amino acid or may be absent
  VARIANT 574..576: note = any amino acid or may be absent
  VARIANT 581..583: note = any amino acid or may be absent
  VARIANT 588..590: note = any amino acid or may be absent
  VARIANT 595..597: note = any amino acid or may be absent
  VARIANT 602..604: note = any amino acid or may be absent
  VARIANT 609..611: note = any amino acid or may be absent
  VARIANT 616..618: note = any amino acid or may be absent
  VARIANT 623..625: note = any amino acid or may be absent
  VARIANT 630..632: note = any amino acid or may be absent
  VARIANT 637..639: note = any amino acid or may be absent
  VARIANT 644..646: note = any amino acid or may be absent
  VARIANT 651..653: note = any amino acid or may be absent
  VARIANT 658..660: note = any amino acid or may be absent
  VARIANT 665..667: note = any amino acid or may be absent
  VARIANT 672..674: note = any amino acid or may be absent
  VARIANT 679..681: note = any amino acid or may be absent
  VARIANT 686..688: note = any amino acid or may be absent
  VARIANT 693..695: note = any amino acid or may be absent
  VARIANT 700..702: note = any amino acid or may be absent
  VARIANT 707..709: note = any amino acid or may be absent
  VARIANT 714..716: note = any amino acid or may be absent
  VARIANT 721..723: note = any amino acid or may be absent
  VARIANT 728..730: note = any amino acid or may be absent
  VARIANT 735..737: note = any amino acid or may be absent
  VARIANT 742..744: note = any amino acid or may be absent
  VARIANT 749..751: note = any amino acid or may be absent
  VARIANT 756..758: note = any amino acid or may be absent
  VARIANT 763..765: note = any amino acid or may be absent
  VARIANT 770..772: note = any amino acid or may be absent
  VARIANT 777..779: note = any amino acid or may be absent
  VARIANT 784..786: note = any amino acid or may be absent
  VARIANT 791..793: note = any amino acid or may be absent
  VARIANT 798..800: note = any amino acid or may be absent
  VARIANT 805..807: note = any amino acid or may be absent
  VARIANT 812..814: note = any amino acid or may be absent
  VARIANT 819..821: note = any amino acid or may be absent
  VARIANT 826..828: note = any amino acid or may be absent
  VARIANT 833..835: note = any amino acid or may be absent
  VARIANT 840..842: note = any amino acid or may be absent
  VARIANT 847..849: note = any amino acid or may be absent
  VARIANT 854..856: note = any amino acid or may be absent
  VARIANT 861..863: note = any amino acid or may be absent
  VARIANT 868..870: note = any amino acid or may be absent
  VARIANT 875..877: note = any amino acid or may be absent
  VARIANT 882..884: note = any amino acid or may be absent
  VARIANT 889..891: note = any amino acid or may be absent
  VARIANT 896..898: note = any amino acid or may be absent
  VARIANT 903..905: note = any amino acid or may be absent
  VARIANT 910..912: note = any amino acid or may be absent
  VARIANT 917..919: note = any amino acid or may be absent
  VARIANT 924..926: note = any amino acid or may be absent
  VARIANT 931..933: note = any amino acid or may be absent
  VARIANT 938..940: note = any amino acid or may be absent
  VARIANT 945..947: note = any amino acid or may be absent
  VARIANT 952..954: note = any amino acid or may be absent
  VARIANT 959..961: note = any amino acid or may be absent
  VARIANT 966..968: note = any amino acid or may be absent
  VARIANT 973..975: note = any amino acid or may be absent
  VARIANT 980..982: note = any amino acid or may be absent
  VARIANT 987..989: note = any amino acid or may be absent
  VARIANT 994..996: note = any amino acid or may be absent
  VARIANT 1001..1003: note = any amino acid or may be absent
  VARIANT 1008..1010: note = any amino acid or may be absent
  VARIANT 1015..1017: note = any amino acid or may be absent
  VARIANT 1022..1024: note = any amino acid or may be absent
  VARIANT 1029..1031: note = any amino acid or may be absent
  VARIANT 1036..1038: note = any amino acid or may be absent
  VARIANT 1043..1045: note = any amino acid or may be absent
  VARIANT 1050..1052: note = any amino acid or may be absent
  VARIANT 1057..1059: note = any amino acid or may be absent
  VARIANT 1064..1066: note = any amino acid or may be absent
  VARIANT 1071..1073: note = any amino acid or may be absent
  VARIANT 1078..1080: note = any amino acid or may be absent
  VARIANT 1085..1087: note = any amino acid or may be absent
  VARIANT 1092..1094: note = any amino acid or may be absent
  VARIANT 1099..1101: note = any amino acid or may be absent
  VARIANT 1106..1108: note = any amino acid or may be absent
  VARIANT 1113..1115: note = any amino acid or may be absent
  VARIANT 1120: note = any amino acid or may be absent
XXPXXGXXXPXXGXXXPXXGXXXPXXGXXXPXXGXXXPXXGXXXPXXGXXXPXXGXXXPXXGXXXPXXGXXXPXXGXXXPXXGXXXPXXGXXXPXXGXXXPXXGXXXPXXGXXXPXXGXXXPXXGXXXPXXGXXXPXXGXXXPXXGXXXPXXGXXXPXXGXXXPXXGXXXPXXGXXXPXXGXXXPXXGXXXPXXGXXXPXXGXXXPXXGXXXPXXGXXXPXXGXXXPXXGXXXPXXGXXXPXXGXXXPXXGXXXPXXGXXXPXXGXXXPXXGXXXPXXGXXXPXXGXXXPXXGXXXPXXGXXXPXXGXXXPXXGXXXPXXGXXXPXXGXXXPXXGXXXPXXGXXXPXXGXXXPXXGXXXPXXGXXXPXXGXXXPXXGXXXPXXGXXXPXXGXXXPXXGXXXPXXGXXXPXXGXXXPXXGXXXPXXGXXXPXXGXXXPXXGXXXPXXGXXXPXXGXXXPXXGXXXPXXGXXXPXXGXXXPXXGXXXPXXGXXXPXXGXXXPXXGXXXPXXGXXXPXXGXXXPXXGXXXPXXGXXXPXXGXXXPXXGXXXPXXGXXXPXXGXXXPXXGXXXPXXGXXXPXXGXXXPXXGXXXPXXGXXXPXXGXXXPXXGXXXPXXGXXXPXXGXXXPXXGXXXPXXGXXXPXXGXXXPXXGXXXPXXGXXXPXXGXXXPXXGXXXPXXGXXXPXXGXXXPXXGXXXPXXGXXXPXXGXXXPXXGXXXPXXGXXXPXXGXXXPXXGXXXPXXGXXXPXXGXXXPXXGXXXPXXGXXXPXXGXXXPXXGXXXPXXGXXXPXXGXXXPXXGXXXPXXGXXXPXXGXXXPXXGXXXPXXGXXXPXXGXXXPXXGXXXPXXGXXXPXXGXXXPXXGXXXPXXGXXXPXXGXXXPXXGXXXPXXGXXXPXXGXXXPXXGXXXPXXGXXXPXXGXXXPXXGXXXPXXGXXXPXXGXXXPXXGXXXPXXGXXXPXXGXXXPXXGXXXPXXGXXXPXXGXXXPXXGXXXPXXGXXXPXXGXXXPXXGXXXPXXGXXXPXXGXXXPXXGXXXPXXGXXXPXXGXXXPXXGXXXPXXGXXXPXXGXXXPXXGXXXPXXGXXXPXXGXXXPXXGXXXPXXGXXXPXXGXXXPXXGXXXPXXGX

SEQ ID NO: 26 - protein, 1280 aa, synthetic construct
  REPEAT 1..8: note = single repeat of (XXPXXXGX)m, wherein m is an integer between 10 and 160
  VARIANT 81..1280: note = up to 150 copies of (XXPXXXGX) can be deleted
  VARIANT 4..6: note = any amino acid except P or G or may be absent
  VARIANT 12..14: note = any amino acid except P or G or may be absent
  VARIANT 20..22: note = any amino acid except P or G or may be absent
  VARIANT 28..30: note = any amino acid except P or G or may be absent
  VARIANT 36..38: note = any amino acid except P or G or may be absent
  VARIANT 44..46: note = any amino acid except P or G or may be absent
  VARIANT 52..54: note = any amino acid except P or G or may be absent
  VARIANT 60..62: note = any amino acid except P or G or may be absent
  VARIANT 68..70: note = any amino acid except P or G or may be absent
  VARIANT 76..78: note = any amino acid except P or G or may be absent
  VARIANT 84..86: note = any amino acid except P or G or may be absent
  VARIANT 92..94: note = any amino acid except P or G or may be absent
  VARIANT 100..102: note = any amino acid except P or G or may be absent
  VARIANT 108..110: note = any amino acid except P or G or may be absent
  VARIANT 116..118: note = any amino acid except P or G or may be absent
  VARIANT 124..126: note = any amino acid except P or G or may be absent
  VARIANT 132..134: note = any amino acid except P or G or may be absent
  VARIANT 140..142: note = any amino acid except P or G or may be absent
  VARIANT 148..150: note = any amino acid except P or G or may be absent
  VARIANT 156..158: note = any amino acid except P or G or may be absent
  VARIANT 164..166: note = any amino acid except P or G or may be absent
  VARIANT 172..174: note = any amino acid except P or G or may be absent
  VARIANT 180..182: note = any amino acid except P or G or may be absent
  VARIANT 188..190: note = any amino acid except P or G or may be absent
  VARIANT 196..198: note = any amino acid except P or G or may be absent
  VARIANT 204..206: note = any amino acid except P or G or may be absent
  VARIANT 212..214: note = any amino acid except P or G or may be absent
  VARIANT 220..222: note = any amino acid except P or G or may be absent
  VARIANT 228..230: note = any amino acid except P or G or may be absent
  VARIANT 236..238: note = any amino acid except P or G or may be absent
  VARIANT 244..246: note = any amino acid except P or G or may be absent
  VARIANT 252..254: note = any amino acid except P or G or may be absent
  VARIANT 260..262: note = any amino acid except P or G or may be absent
  VARIANT 268..270: note = any amino acid except P or G or may be absent
  VARIANT 276..278: note = any amino acid except P or G or may be absent
  VARIANT 284..286: note = any amino acid except P or G or may be absent
  VARIANT 292..294: note = any amino acid except P or G or may be absent
  VARIANT 300..302: note = any amino acid except P or G or may be absent
  VARIANT 308..310: note = any amino acid except P or G or may be absent
  VARIANT 316..318: note = any amino acid except P or G or may be absent
  VARIANT 324..326: note = any amino acid except P or G or may be absent
  VARIANT 332..334: note = any amino acid except P or G or may be absent
  VARIANT 340..342: note = any amino acid except P or G or may be absent
  VARIANT 348..350: note = any amino acid except P or G or may be absent
  VARIANT 356..358: note = any amino acid except P or G or may be absent
  VARIANT 364..366: note = any amino acid except P or G or may be absent
  VARIANT 372..374: note = any amino acid except P or G or may be absent
  VARIANT 380..382: note = any amino acid except P or G or may be absent
  VARIANT 388..390: note = any amino acid except P or G or may be absent
  VARIANT 396..398: note = any amino acid except P or G or may be absent
  VARIANT 404..406: note = any amino acid except P or G or may be absent
  VARIANT 412..414: note = any amino acid except P or G or may be absent
  VARIANT 420..422: note = any amino acid except P or G or may be absent
  VARIANT 428..430: note = any amino acid except P or G or may be absent
  VARIANT 436..438: note = any amino acid except P or G or may be absent
  VARIANT 444..446: note = any amino acid except P or G or may be absent
  VARIANT 452..454: note = any amino acid except P or G or may be absent
  VARIANT 460..462: note = any amino acid except P or G or may be absent
  VARIANT 468..470: note = any amino acid except P or G or may be absent
  VARIANT 476..478: note = any amino acid except P or G or may be absent
  VARIANT 484..486: note = any amino acid except P or G or may be absent
  VARIANT 492..494: note = any amino acid except P or G or may be absent
  VARIANT 500..502: note = any amino acid except P or G or may be absent
  VARIANT 508..510: note = any amino acid except P or G or may be absent
  VARIANT 516..518: note = any amino acid except P or G or may be absent
  VARIANT 524..526: note = any amino acid except P or G or may be absent
  VARIANT 532..534: note = any amino acid except P or G or may be absent
  VARIANT 540..542: note = any amino acid except P or G or may be absent
  VARIANT 548..550: note = any amino acid except P or G or may be absent
  VARIANT 556..558: note = any amino acid except P or G or may be absent
  VARIANT 564..566: note = any amino acid except P or G or may be absent
  VARIANT 572..574: note = any amino acid except P or G or may be absent
  VARIANT 580..582: note = any amino acid except P or G or may be absent
  VARIANT 588..590: note = any amino acid except P or G or may be absent
  VARIANT 596..598: note = any amino acid except P or G or may be absent
  VARIANT 604..606: note = any amino acid except P or G or may be absent
  VARIANT 612..614: note = any amino acid except P or G or may be absent
  VARIANT 620..622: note = any amino acid except P or G or may be absent
  VARIANT 628..630: note = any amino acid except P or G or may be absent
  VARIANT 636..638: note = any amino acid except P or G or may be absent
  VARIANT 644..646: note = any amino acid except P or G or may be absent
  VARIANT 652..654: note = any amino acid except P or G or may be absent
  VARIANT 660..662: note = any amino acid except P or G or may be absent
  VARIANT 668..670: note = any amino acid except P or G or may be absent
  VARIANT 676..678: note = any amino acid except P or G or may be absent
  VARIANT 684..686: note = any amino acid except P or G or may be absent
  VARIANT 692..694: note = any amino acid except P or G or may be absent
  VARIANT 700..702: note = any amino acid except P or G or may be absent
  VARIANT 708..710: note = any amino acid except P or G or may be absent
  VARIANT 716..718: note = any amino acid except P or G or may be absent
  VARIANT 724..726: note = any amino acid except P or G or may be absent
  VARIANT 732..734: note = any amino acid except P or G or may be absent
  VARIANT 740..742: note = any amino acid except P or G or may be absent
  VARIANT 748..750: note = any amino acid except P or G or may be absent
  VARIANT 756..758: note = any amino acid except P or G or may be absent
  VARIANT 764..766: note = any amino acid except P or G or may be absent
  VARIANT 772..774: note = any amino acid except P or G or may be absent
  VARIANT 780..782: note = any amino acid except P or G or may be absent
  VARIANT 788..790: note = any amino acid except P or G or may be absent
  VARIANT 796..798: note = any amino acid except P or G or may be absent
  VARIANT 804..806: note = any amino acid except P or G or may be absent
  VARIANT 812..814: note = any amino acid except P or G or may be absent
  VARIANT 820..822: note = any amino acid except P or G or may be absent
  VARIANT 828..830: note = any amino acid except P or G or may be absent
  VARIANT 836..838: note = any amino acid except P or G or may be absent
  VARIANT 844..846: note = any amino acid except P or G or may be absent
  VARIANT 852..854: note = any amino acid except P or G or may be absent
  VARIANT 860..862: note = any amino acid except P or G or may be absent
  VARIANT 868..870: note = any amino acid except P or G or may be absent
  VARIANT 876..878: note = any amino acid except P or G or may be absent
  VARIANT 884..886: note = any amino acid except P or G or may be absent
  VARIANT 892..894: note = any amino acid except P or G or may be absent
  VARIANT 900..902: note = any amino acid except P or G or may be absent
  VARIANT 908..910: note = any amino acid except P or G or may be absent
  VARIANT 916..918: note = any amino acid except P or G or may be absent
  VARIANT 924..926: note = any amino acid except P or G or may be absent
  VARIANT 932..934: note = any amino acid except P or G or may be absent
  VARIANT 940..942: note = any amino acid except P or G or may be absent
  VARIANT 948..950: note = any amino acid except P or G or may be absent
  VARIANT 956..958: note = any amino acid except P or G or may be absent
  VARIANT 964..966: note = any amino acid except P or G or may be absent
  VARIANT 972..974: note = any amino acid except P or G or may be absent
  VARIANT 980..982: note = any amino acid except P or G or may be absent
  VARIANT 988..990: note = any amino acid except P or G or may be absent
  VARIANT 996..998: note = any amino acid except P or G or may be absent
  VARIANT 1004..1006: note = any amino acid except P or G or may be absent
  VARIANT 1012..1014: note = any amino acid except P or G or may be absent
  VARIANT 1020..1022: note = any amino acid except P or G or may be absent
  VARIANT 1028..1030: note = any amino acid except P or G or may be absent
  VARIANT 1036..1038: note = any amino acid except P or G or may be absent
  VARIANT 1044..1046: note = any amino acid except P or G or may be absent
  VARIANT 1052..1054: note = any amino acid except P or G or may be absent
  VARIANT 1060..1062: note = any amino acid except P or G or may be absent
  VARIANT 1068..1070: note = any amino acid except P or G or may be absent
  VARIANT 1076..1078: note = any amino acid except P or G or may be absent
  VARIANT 1084..1086: note = any amino acid except P or G or may be absent
  VARIANT 1092..1094: note = any amino acid except P or G or may be absent
  VARIANT 1100..1102: note = any amino acid except P or G or may be absent
  VARIANT 1108..1110: note = any amino acid except P or G or may be absent
  VARIANT 1116..1118: note = any amino acid except P or G or may be absent
  VARIANT 1124..1126: note = any amino acid except P or G or may be absent
  VARIANT 1132..1134: note = any amino acid except P or G or may be absent
  VARIANT 1140..1142: note = any amino acid except P or G or may be absent
  VARIANT 1148..1150: note = any amino acid except P or G or may be absent
  VARIANT 1156..1158: note = any amino acid except P or G or may be absent
  VARIANT 1164..1166: note = any amino acid except P or G or may be absent
  VARIANT 1172..1174: note = any amino acid except P or G or may be absent
  VARIANT 1180..1182: note = any amino acid except P or G or may be absent
  VARIANT 1188..1190: note = any amino acid except P or G or may be absent
  VARIANT 1196..1198: note = any amino acid except P or G or may be absent
  VARIANT 1204..1206: note = any amino acid except P or G or may be absent
  VARIANT 1212..1214: note = any amino acid except P or G or may be absent
  VARIANT 1220..1222: note = any amino acid except P or G or may be absent
  VARIANT 1228..1230: note = any amino acid except P or G or may be absent
  VARIANT 1236..1238: note = any amino acid except P or G or may be absent
  VARIANT 1244..1246: note = any amino acid except P or G or may be absent
  VARIANT 1252..1254: note = any amino acid except P or G or may be absent
  VARIANT 1260..1262: note = any amino acid except P or G or may be absent
  VARIANT 1268..1270: note = any amino acid except P or G or may be absent
  VARIANT 1276..1278: note = any amino acid except P or G or may be absent
  VARIANT 1..2: note = any amino acid or may be absent
  VARIANT 8..10: note = any amino acid or may be absent
  VARIANT 16..18: note = any amino acid or may be absent
  VARIANT 24..26: note = any amino acid or may be absent
  VARIANT 32..34: note = any amino acid or may be absent
  VARIANT 40..42: note = any amino acid or may be absent
  VARIANT 48..50: note = any amino acid or may be absent
  VARIANT 56..58: note = any amino acid or may be absent
  VARIANT 64..66: note = any amino acid or may be absent
  VARIANT 72..74: note = any amino acid or may be absent
  VARIANT 80..82: note = any amino acid or may be absent
  VARIANT 88..90: note = any amino acid or may be absent
  VARIANT 96..98: note = any amino acid or may be absent
  VARIANT 104..106: note = any amino acid or may be absent
  VARIANT 112..114: note = any amino acid or may be absent
  VARIANT 120..122: note = any amino acid or may be absent
  VARIANT 128..130: note = any amino acid or may be absent
  VARIANT 136..138: note = any amino acid or may be absent
  VARIANT 144..146: note = any amino acid or may be absent
  VARIANT 152..154: note = any amino acid or may be absent
  VARIANT 160..162: note = any amino acid or may be absent
  VARIANT 168..170: note = any amino acid or may be absent
  VARIANT 176..178: note = any amino acid or may be absent
  VARIANT 184..186: note = any amino acid or may be absent
  VARIANT 192..194: note = any amino acid or may be absent
  VARIANT 200..202: note = any amino acid or may be absent
  VARIANT 208..210: note = any amino acid or may be absent
  VARIANT 216..218: note = any amino acid or may be absent
  VARIANT 224..226: note = any amino acid or may be absent
  VARIANT 232..234: note = any amino acid or may be absent
  VARIANT 240..242: note = any amino acid or may be absent
  VARIANT 248..250: note = any amino acid or may be absent
  VARIANT 256..258: note = any amino acid or may be absent
  VARIANT 264..266: note = any amino acid or may be absent
  VARIANT 272..274: note = any amino acid or may be absent
  VARIANT 280..282: note = any amino acid or may be absent
  VARIANT 288..290: note = any amino acid or may be absent
  VARIANT 296..298: note = any amino acid or may be absent
  VARIANT 304..306: note = any amino acid or may be absent
  VARIANT 312..314: note = any amino acid or may be absent
  VARIANT 320..322: note = any amino acid or may be absent
  VARIANT 328..330: note = any amino acid or may be absent
  VARIANT 336..338: note = any amino acid or may be absent
  VARIANT 344..346: note = any amino acid or may be absent
  VARIANT 352..354: note = any amino acid or may be absent
  VARIANT 360..362: note = any amino acid or may be absent
  VARIANT 368..370: note = any amino acid or may be absent
  VARIANT 376..378: note = any amino acid or may be absent
  VARIANT 384..386: note = any amino acid or may be absent
  VARIANT 392..394: note = any amino acid or may be absent
  VARIANT 400..402: note = any amino acid or may be absent
  VARIANT 408..410: note = any amino acid or may be absent
  VARIANT 416..418: note = any amino acid or may be absent
  VARIANT 424..426: note = any amino acid or may be absent
  VARIANT 432..434: note = any amino acid or may be absent
  VARIANT 440..442: note = any amino acid or may be absent
  VARIANT 448..450: note = any amino acid or may be absent
  VARIANT 456..458: note = any amino acid or may be absent
  VARIANT 464..466: note = any amino acid or may be absent
  VARIANT 472..474: note = any amino acid or may be absent
  VARIANT 480..482: note = any amino acid or may be absent
  VARIANT 488..490: note = any amino acid or may be absent
  VARIANT 496..498: note = any amino acid or may be absent
  VARIANT 504..506: note = any amino acid or may be absent
  VARIANT 512..514: note = any amino acid or may be absent
  VARIANT 520..522: note = any amino acid or may be absent
  VARIANT 528..530: note = any amino acid or may be absent
  VARIANT 536..538: note = any amino acid or may be absent
  VARIANT 544..546: note = any amino acid or may be absent
  VARIANT 552..554: note = any amino acid or may be absent
  VARIANT 560..562: note = any amino acid or may be absent
  VARIANT 568..570: note = any amino acid or may be absent
  VARIANT 576..578: note = any amino acid or may be absent
  VARIANT 584..586: note = any amino acid or may be absent
  VARIANT 592..594: note = any amino acid or may be absent
  VARIANT 600..602: note = any amino acid or may be absent
  VARIANT 608..610: note = any amino acid or may be absent
  VARIANT 616..618: note = any amino acid or may be absent
  VARIANT 624..626: note = any amino acid or may be absent
  VARIANT 632..634: note = any amino acid or may be absent
  VARIANT 640..642: note = any amino acid or may be absent
  VARIANT 648..650: note = any amino acid or may be absent
  VARIANT 656..658: note = any amino acid or may be absent
  VARIANT 664..666: note = any amino acid or may be absent
  VARIANT 672..674: note = any amino acid or may be absent
  VARIANT 680..682: note = any amino acid or may be absent
  VARIANT 688..690: note = any amino acid or may be absent
  VARIANT 696..698: note = any amino acid or may be absent
  VARIANT 704..706: note = any amino acid or may be absent
  VARIANT 712..714: note = any amino acid or may be absent
  VARIANT 720..722: note = any amino acid or may be absent
  VARIANT 728..730: note = any amino acid or may be absent
  VARIANT 736..738: note = any amino acid or may be absent
  VARIANT 744..746: note = any amino acid or may be absent
  VARIANT 752..754: note = any amino acid or may be absent
  VARIANT 760..762: note = any amino acid or may be absent
  VARIANT 768..770: note = any amino acid or may be absent
  VARIANT 776..778: note = any amino acid or may be absent
  VARIANT 784..786: note = any amino acid or may be absent
  VARIANT 792..794: note = any amino acid or may be absent
  VARIANT 800..802: note = any amino acid or may be absent
  VARIANT 808..810: note = any amino acid or may be absent
  VARIANT 816..818: note = any amino acid or may be absent
  VARIANT 824..826: note = any amino acid or may be absent
  VARIANT 832..834: note = any amino acid or may be absent
  VARIANT 840..842: note = any amino acid or may be absent
  VARIANT 848..850: note = any amino acid or may be absent
  VARIANT 856..858: note = any amino acid or may be absent
  VARIANT 864..866: note = any amino acid or may be absent
  VARIANT 872..874: note = any amino acid or may be absent
  VARIANT 880..882: note = any amino acid or may be absent
  VARIANT 888..890: note = any amino acid or may be absent
  VARIANT 896..898: note = any amino acid or may be absent
  VARIANT 904..906: note = any amino acid or may be absent
  VARIANT 912..914: note = any amino acid or may be absent
  VARIANT 920..922: note = any amino acid or may be absent
  VARIANT 928..930: note = any amino acid or may be absent
  VARIANT 936..938: note = any amino acid or may be absent
  VARIANT 944..946: note = any amino acid or may be absent
  VARIANT 952..954: note = any amino acid or may be absent
  VARIANT 960..962: note = any amino acid or may be absent
  VARIANT 968..970: note = any amino acid or may be absent
  VARIANT 976..978: note = any amino acid or may be absent
  VARIANT 984..986: note = any amino acid or may be absent
  VARIANT 992..994: note = any amino acid or may be absent
  VARIANT 1000..1002: note = any amino acid or may be absent
  VARIANT 1008..1010: note = any amino acid or may be absent
  VARIANT 1016..1018: note = any amino acid or may be absent
  VARIANT 1024..1026: note = any amino acid or may be absent
  VARIANT 1032..1034: note = any amino acid or may be absent
  VARIANT 1040..1042: note = any amino acid or may be absent
  VARIANT 1048..1050: note = any amino acid or may be absent
  VARIANT 1056..1058: note = any amino acid or may be absent
  VARIANT 1064..1066: note = any amino acid or may be absent
  VARIANT 1072..1074: note = any amino acid or may be absent
  VARIANT 1080..1082: note = any amino acid or may be absent
  VARIANT 1088..1090: note = any amino acid or may be absent
  VARIANT 1096..1098: note = any amino acid or may be absent
  VARIANT 1104..1106: note = any amino acid or may be absent
  VARIANT 1112..1114: note = any amino acid or may be absent
  VARIANT 1120..1122: note = any amino acid or may be absent
  VARIANT 1128..1130: note = any amino acid or may be absent
  VARIANT 1136..1138: note = any amino acid or may be absent
  VARIANT 1144..1146: note = any amino acid or may be absent
  VARIANT 1152..1154: note = any amino acid or may be absent
  VARIANT 1160..1162: note = any amino acid or may be absent
  VARIANT 1168..1170: note = any amino acid or may be absent
  VARIANT 1176..1178: note = any amino acid or may be absent
  VARIANT 1184..1186: note = any amino acid or may be absent
  VARIANT 1192..1194: note = any amino acid or may be absent
  VARIANT 1200..1202: note = any amino acid or may be absent
  VARIANT 1208..1210: note = any amino acid or may be absent
  VARIANT 1216..1218: note = any amino acid or may be absent
  VARIANT 1224..1226: note = any amino acid or may be absent
  VARIANT 1232..1234: note = any amino acid or may be absent
  VARIANT 1240..1242: note = any amino acid or may be absent
  VARIANT 1248..1250: note = any amino acid or may be absent
  VARIANT 1256..1258: note = any amino acid or may be absent
  VARIANT 1264..1266: note = any amino acid or may be absent
  VARIANT 1272..1274: note = any amino acid or may be absent
  VARIANT 1280: note = any amino acid or may be absent
XXPXXXGXXXPXXXGXXXPXXXGXXXPXXXGXXXPXXXGXXXPXXXGXXXPXXXGXXXPXXXGXXXPXXXGXXXPXXXGXXXPXXXGXXXPXXXGXXXPXXXGXXXPXXXGXXXPXXXGXXXPXXXGXXXPXXXGXXXPXXXGXXXPXXXGXXXPXXXGXXXPXXXGXXXPXXXGXXXPXXXGXXXPXXXGXXXPXXXGXXXPXXXGXXXPXXXGXXXPXXXGXXXPXXXGXXXPXXXGXXXPXXXGXXXPXXXGXXXPXXXGXXXPXXXGXXXPXXXGXXXPXXXGXXXPXXXGXXXPXXXGXXXPXXXGXXXPXXXGXXXPXXXGXXXPXXXGXXXPXXXGXXXPXXXGXXXPXXXGXXXPXXXGXXXPXXXGXXXPXXXGXXXPXXXGXXXPXXXGXXXPXXXGXXXPXXXGXXXPXXXGXXXPXXXGXXXPXXXGXXXPXXXGXXXPXXXGXXXPXXXGXXXPXXXGXXXPXXXGXXXPXXXGXXXPXXXGXXXPXXXGXXXPXXXGXXXPXXXGXXXPXXXGXXXPXXXGXXXPXXXGXXXPXXXGXXXPXXXGXXXPXXXGXXXPXXXGXXXPXXXGXXXPXXXGXXXPXXXGXXXPXXXGXXXPXXXGXXXPXXXGXXXPXXXGXXXPXXXGXXXPXXXGXXXPXXXGXXXPXXXGXXXPXXXGXXXPXXXGXXXPXXXGXXXPXXXGXXXPXXXGXXXPXXXGXXXPXXXGXXXPXXXGXXXPXXXGXXXPXXXGXXXPXXXGXXXPXXXGXXXPXXXGXXXPXXXGXXXPXXXGXXXPXXXGXXXPXXXGXXXPXXXGXXXPXXXGXXXPXXXGXXXPXXXGXXXPXXXGXXXPXXXGXXXPXXXGXXXPXXXGXXXPXXXGXXXPXXXGXXXPXXXGXXXPXXXGXXXPXXXGXXXPXXXGXXXPXXXGXXXPXXXGXXXPXXXGXXXPXXXGXXXPXXXGXXXPXXXGXXXPXXXGXXXPXXXGXXXPXXXGXXXPXXXGXXXPXXXGXXXPXXXGXXXPXXXGXXXPXXXGXXXPXXXGXXXPXXXGXXXPXXXGXXXPXXXGXXXPXXXGXXXPXXXGXXXPXXXGXXXPXXXGXXXPXXXGXXXPXXXGXXXPXXXGXXXPXXXGXXXPXXXGXXXPXXXGXXXPXXXGXXXPXXXGXXXPXXXGXXXPXXXGXXXPXXXGXXXPXXXGXXXPXXXGXXXPXXXGXXXPXXXGXXXPXXXGXXXPXXXGXXXPXXXGXXXPXXXGXXXPXXXGXXXPXXXGXXXPXXXGXXXPXXXGXXXPXXXGX

SEQ ID NO: 27 - protein, 400 aa, synthetic construct
  REPEAT 1..5: note = single repeat of (GVGVP)m, wherein m is 20, 40, or 80
  VARIANT 101..400: note = 40 or 60 copies of (GVGVP) can be deleted
GVGVPGVGVPGVGVPGVGVPGVGVPGVGVPGVGVPGVGVPGVGVPGVGVPGVGVPGVGVPGVGVPGVGVPGVGVPGVGVPGVGVPGVGVPGVGVPGVGVPGVGVPGVGVPGVGVPGVGVPGVGVPGVGVPGVGVPGVGVPGVGVPGVGVPGVGVPGVGVPGVGVPGVGVPGVGVPGVGVPGVGVPGVGVPGVGVPGVGVPGVGVPGVGVPGVGVPGVGVPGVGVPGVGVPGVGVPGVGVPGVGVPGVGVPGVGVPGVGVPGVGVPGVGVPGVGVPGVGVPGVGVPGVGVPGVGVPGVGVPGVGVPGVGVPGVGVPGVGVPGVGVPGVGVPGVGVPGVGVPGVGVPGVGVPGVGVPGVGVPGVGVPGVGVPGVGVPGVGVPGVGVPGVGVPGVGVPGVGVP

SEQ ID NO: 28 - protein, 1280 aa, synthetic construct
  REPEAT 1..8: note = single repeat of (GRGDXPXX)m, wherein m is an integer between 10 and 160
  VARIANT 81..1280: note = up to 150 copies of (GRGDXPXX) can be deleted
  VARIANT 5: note = Q or S
  VARIANT 8: note = Q or S
  VARIANT 13: note = Q or S
  VARIANT 16: note = Q or S
  VARIANT 21: note = Q or S
  VARIANT 24: note = Q or S
  VARIANT 29: note = Q or S
  VARIANT 32: note = Q or S
  VARIANT 37: note = Q or S
  VARIANT 40: note = Q or S
  VARIANT 45: note = Q or S
  VARIANT 48: note = Q or S
  VARIANT 53: note = Q or S
  VARIANT 56: note = Q or S
  VARIANT 61: note = Q or S
  VARIANT 64: note = Q or S
  VARIANT 69: note = Q or S
  VARIANT 72: note = Q or S
  VARIANT 77: note = Q or S
  VARIANT 80: note = Q or S
  VARIANT 85: note = Q or S
  VARIANT 88: note = Q or S
  VARIANT 93: note = Q or S
  VARIANT 96: note = Q or S
  VARIANT 101: note = Q or S
  VARIANT 104: note = Q or S
  VARIANT 109: note = Q or S
  VARIANT 112: note = Q or S
  VARIANT 117: note = Q or S
  VARIANT 120: note = Q or S
  VARIANT 125: note = Q or S
  VARIANT 128: note = Q or S
  VARIANT 133: note = Q or S
  VARIANT 136: note = Q or S
  VARIANT 141: note = Q or S
  VARIANT 144: note = Q or S
  VARIANT 149: note = Q or S
  VARIANT 152: note = Q or S
  VARIANT 157: note = Q or S
  VARIANT 160: note = Q or S
  VARIANT 165: note = Q or S
  VARIANT 168: note = Q or S
  VARIANT 173: note = Q or S
  VARIANT 176: note = Q or S
  VARIANT 181: note = Q or S
  VARIANT 184: note = Q or S
  VARIANT 189: note = Q or S
  VARIANT 192: note = Q or S
  VARIANT 197: note = Q or S
  VARIANT 200: note = Q or S
  VARIANT 205: note = Q or S
  VARIANT 208: note = Q or S
  VARIANT 213: note = Q or S
  VARIANT 216: note = Q or S
  VARIANT 221: note = Q or S
  VARIANT 224: note = Q or S
  VARIANT 229: note = Q or S
  VARIANT 232: note = Q or S
  VARIANT 237: note = Q or S
  VARIANT 240: note = Q or S
  VARIANT 245: note = Q or S
  VARIANT 248: note = Q or S
  VARIANT 253: note = Q or S
  VARIANT 256: note = Q or S
  VARIANT 261: note = Q or S
  VARIANT 264: note = Q or S
  VARIANT 269: note = Q or S
  VARIANT 272: note = Q or S
  VARIANT 277: note = Q or S
  VARIANT 280: note = Q or S
  VARIANT 285: note = Q or S
  VARIANT 288: note = Q or S
  VARIANT 293: note = Q or S
  VARIANT 296: note = Q or S
  VARIANT 301: note = Q or S
  VARIANT 304: note = Q or S
  VARIANT 309: note = Q or S
  VARIANT 312: note = Q or S
  VARIANT 317: note = Q or S
  VARIANT 320: note = Q or S
  VARIANT 325: note = Q or S
  VARIANT 328: note = Q or S
  VARIANT 333: note = Q or S
  VARIANT 336: note = Q or S
  VARIANT 341: note = Q or S
  VARIANT 344: note = Q or S
  VARIANT 349: note = Q or S
  VARIANT 352: note = Q or S
  VARIANT 357: note = Q or S
  VARIANT 360: note = Q or S
  VARIANT 365: note = Q or S
  VARIANT 368: note = Q or S
  VARIANT 373: note = Q or S
  VARIANT 376: note = Q or S
  VARIANT 381: note = Q or S
  VARIANT 384: note = Q or S
  VARIANT 389: note = Q or S
  VARIANT 392: note = Q or S
  VARIANT 397: note = Q or S
  VARIANT 400: note = Q or S
  VARIANT 405: note = Q or S
  VARIANT 408: note = Q or S
  VARIANT 413: note = Q or S
  VARIANT 416: note = Q or S
  VARIANT 421: note = Q or S
  VARIANT 424: note = Q or S
  VARIANT 429: note = Q or S
  VARIANT 432: note = Q or S
  VARIANT 437: note = Q or S
  VARIANT 440: note = Q or S
  VARIANT 445: note = Q or S
  VARIANT 448: note = Q or S
  VARIANT 453: note = Q or S
  VARIANT 456: note = Q or S
  VARIANT 461: note = Q or S
  VARIANT 464: note = Q or S
  VARIANT 469: note = Q or S
  VARIANT 472: note = Q or S
  VARIANT 477: note = Q or S
  VARIANT 480: note = Q or S
  VARIANT 485: note = Q or S
  VARIANT 488: note = Q or S
  VARIANT 493: note = Q or S
  VARIANT 496: note = Q or S
  VARIANT 501: note = Q or S
  VARIANT 504: note = Q or S
  VARIANT 509: note = Q or S
  VARIANT 512: note = Q or S
  VARIANT 517: note = Q or S
  VARIANT 520: note = Q or S
  VARIANT 525: note = Q or S
  VARIANT 528: note = Q or S
  VARIANT 533: note = Q or S
  VARIANT 536: note = Q or S
  VARIANT 541: note = Q or S
  VARIANT 544: note = Q or S
  VARIANT 549: note = Q or S
  VARIANT 552: note = Q or S
  VARIANT 557: note = Q or S
  VARIANT 560: note = Q or S
  VARIANT 565: note = Q or S
  VARIANT 568: note = Q or S
  VARIANT 573: note = Q or S
  VARIANT 576: note = Q or S
  VARIANT 581: note = Q or S
  VARIANT 584: note = Q or S
  VARIANT 589: note = Q or S
  VARIANT 592: note = Q or S
  VARIANT 597: note = Q or S
  VARIANT 600: note = Q or S
  VARIANT 605: note = Q or S
  VARIANT 608: note = Q or S
  VARIANT 613: note = Q or S
  VARIANT 616: note = Q or S
  VARIANT 621: note = Q or S
  VARIANT 624: note = Q or S
  VARIANT 629: note = Q or S
  VARIANT 632: note = Q or S
  VARIANT 637: note = Q or S
  VARIANT 640: note = Q or S
  VARIANT 645: note = Q or S
  VARIANT 648: note = Q or S
  VARIANT 653: note = Q or S
  VARIANT 656: note = Q or S
  VARIANT 661: note = Q or S
  VARIANT 664: note = Q or S
  VARIANT 669: note = Q or S
  VARIANT 672: note = Q or S
  VARIANT 677: note = Q or S
  VARIANT 680: note = Q or S
  VARIANT 685: note = Q or S
  VARIANT 688: note = Q or S
  VARIANT 693: note = Q or S
  VARIANT 696: note = Q or S
  VARIANT 701: note = Q or S
  VARIANT 704: note = Q or S
  VARIANT 709: note = Q or S
  VARIANT 712: note = Q or S
  VARIANT 717: note = Q or S
  VARIANT 720: note = Q or S
  VARIANT 725: note = Q or S
  VARIANT 728: note = Q or S
  VARIANT 733: note = Q or S
  VARIANT 736: note = Q or S
  VARIANT 741: note = Q or S
  VARIANT 744: note = Q or S
  VARIANT 749: note = Q or S
  VARIANT 752: note = Q or S
  VARIANT 757: note = Q or S
  VARIANT 760: note = Q or S
  VARIANT 765: note = Q or S
  VARIANT 768: note = Q or S
  VARIANT 773: note = Q or S
  VARIANT 776: note = Q or S
  VARIANT 781: note = Q or S
  VARIANT 784: note = Q or S
  VARIANT 789: note = Q or S
  VARIANT 792: note = Q or S
  VARIANT 797: note = Q or S
  VARIANT 800: note = Q or S
  VARIANT 805: note = Q or S
  VARIANT 808: note = Q or S
  VARIANT 813: note = Q or S
  VARIANT 816: note = Q or S
  VARIANT 821: note = Q or S
  VARIANT 824: note = Q or S
  VARIANT 829: note = Q or S
  VARIANT 832: note = Q or S
  VARIANT 837: note = Q or S
  VARIANT 840: note = Q or S
  VARIANT 845: note = Q or S
  VARIANT 848: note = Q or S
  VARIANT 853: note = Q or S
  VARIANT 856: note = Q or S
  VARIANT 861: note = Q or S
  VARIANT 864: note = Q or S
  VARIANT 869: note = Q or S
  VARIANT 872: note = Q or S
  VARIANT 877: note = Q or S
  VARIANT 880: note = Q or S
  VARIANT 885: note = Q or S
  VARIANT 888: note = Q or S
  VARIANT 893: note = Q or S
  VARIANT 896: note = Q or S
  VARIANT 901: note = Q or S
  VARIANT 904: note = Q or S
  VARIANT 909: note = Q or S
  VARIANT 912: note = Q or S
  VARIANT 917: note = Q or S
  VARIANT 920: note = Q or S
  VARIANT 925: note = Q or S
  VARIANT 928: note = Q or S
  VARIANT 933: note = Q or S
  VARIANT 936: note = Q or S
  VARIANT 941: note = Q or S
  VARIANT 944: note = Q or S
  VARIANT 949: note = Q or S
  VARIANT 952: note = Q or S
  VARIANT 957: note = Q or S
  VARIANT 960: note = Q or S
  VARIANT 965: note = Q or S
  VARIANT 968: note = Q or S
  VARIANT 973: note = Q or S
  VARIANT 976: note = Q or S
  VARIANT 981: note = Q or S
  VARIANT 984: note = Q or S
  VARIANT 989: note = Q or S
  VARIANT 992: note = Q or S
  VARIANT 997: note = Q or S
  VARIANT 1000: note = Q or S
  VARIANT 1005: note = Q or S
  VARIANT 1008: note = Q or S
  VARIANT 1013: note = Q or S
  VARIANT 1016: note = Q or S
  VARIANT 1021: note = Q or S
  VARIANT 1024: note = Q or S
  VARIANT 1029: note = Q or S
  VARIANT 1032: note = Q or S
  VARIANT 1037: note = Q or S
  VARIANT 1040: note = Q or S
  VARIANT 1045: note = Q or S
  VARIANT 1048: note = Q or S
  VARIANT 1053: note = Q or S
  VARIANT 1056: note = Q or S
  VARIANT 1061: note = Q or S
  VARIANT 1064: note = Q or S
  VARIANT 1069: note = Q or S
  VARIANT 1072: note = Q or S
  VARIANT 1077: note = Q or S
  VARIANT 1080: note = Q or S
  VARIANT 1085: note = Q or S
  VARIANT 1088: note = Q or S
  VARIANT 1093: note = Q or S
  VARIANT 1096: note = Q or S
  VARIANT 1101: note = Q or S
  VARIANT 1104: note = Q or S
  VARIANT 1109: note = Q or S
  VARIANT 1112: note = Q or S
  VARIANT 1117: note = Q or S
  VARIANT 1120: note = Q or S
  VARIANT 1125: note = Q or S
  VARIANT 1128: note = Q or S
  VARIANT 1133: note = Q or S
  VARIANT 1136: note = Q or S
  VARIANT 1141: note = Q or S
  VARIANT 1144: note = Q or S
  VARIANT 1149: note = Q or S
  VARIANT 1152: note = Q or S
  VARIANT 1157: note = Q or S
  VARIANT 1160: note = Q or S
  VARIANT 1165: note = Q or S
  VARIANT 1168: note = Q or S
  VARIANT 1173: note = Q or S
  VARIANT 1176: note = Q or S
  VARIANT 1181: note = Q or S
  VARIANT 1184: note = Q or S
  VARIANT 1189: note = Q or S
  VARIANT 1192: note = Q or S
  VARIANT 1197: note = Q or S
  VARIANT 1200: note = Q or S
  VARIANT 1205: note = Q or S
  VARIANT 1208: note = Q or S
  VARIANT 1213: note = Q or S
  VARIANT 1216: note = Q or S
  VARIANT 1221: note = Q or S
  VARIANT 1224: note = Q or S
  VARIANT 1229: note = Q or S
  VARIANT 1232: note = Q or S
  VARIANT 1237: note = Q or S
  VARIANT 1240: note = Q or S
  VARIANT 1245: note = Q or S
  VARIANT 1248: note = Q or S
  VARIANT 1253: note = Q or S
  VARIANT 1256: note = Q or S
  VARIANT 1261: note = Q or S
  VARIANT 1264: note = Q or S
  VARIANT 1269: note = Q or S
  VARIANT 1272: note = Q or S
  VARIANT 1277: note = Q or S
  VARIANT 1280: note = Q or S
  VARIANT 7: note = Y or V
  VARIANT 15: note = Y or V
  VARIANT 23: note = Y or V
  VARIANT 31: note = Y or V
  VARIANT 39: note = Y or V
  VARIANT 47: note = Y or V
  VARIANT 55: note = Y or V
  VARIANT 63: note = Y or V
  VARIANT 71: note = Y or V
  VARIANT 79: note = Y or V
  VARIANT 87: note = Y or V
  VARIANT 95: note = Y or V
  VARIANT 103: note = Y or V
  VARIANT 111: note = Y or V
  VARIANT 119: note = Y or V
  VARIANT 127: note = Y or V
  VARIANT 135: note = Y or V
  VARIANT 143: note = Y or V
  VARIANT 151: note = Y or V
  VARIANT 159: note = Y or V
  VARIANT 167: note = Y or V
  VARIANT 175: note = Y or V
  VARIANT 183: note = Y or V
  VARIANT 191: note = Y or V
  VARIANT 199: note = Y or V
  VARIANT 207: note = Y or V
  VARIANT 215: note = Y or V
  VARIANT 223: note = Y or V
  VARIANT 231: note = Y or V
  VARIANT 239: note = Y or V
  VARIANT 247: note = Y or V
  VARIANT 255: note = Y or V
  VARIANT 263: note = Y or V
  VARIANT 271: note = Y or V
  VARIANT 279: note = Y or V
  VARIANT 287: note = Y or V
  VARIANT 295: note = Y or V
  VARIANT 303: note = Y or V
  VARIANT 311: note = Y or V
  VARIANT 319: note = Y or V
  VARIANT 327: note = Y or V
  VARIANT 335: note = Y or V
  VARIANT 343: note = Y or V
  VARIANT 351: note = Y or V
  VARIANT 359: note = Y or V
  VARIANT 367: note = Y or V
  VARIANT 375: note = Y or V
  VARIANT 383: note = Y or V
  VARIANT 391: note = Y or V
  VARIANT 399: note = Y or V
  VARIANT 407: note = Y or V
  VARIANT 415: note = Y or V
  VARIANT 423: note = Y or V
  VARIANT 431: note = Y or V
  VARIANT 439: note = Y or V
  VARIANT 447: note = Y or V
  VARIANT 455: note = Y or V
  VARIANT 463: note = Y or V
  VARIANT 471: note = Y or V
  VARIANT 479: note = Y or V
  VARIANT 487: note = Y or V
  VARIANT 495: note = Y or V
  VARIANT 503: note = Y or V
  VARIANT 511: note = Y or V
  VARIANT 519: note = Y or V
  VARIANT 527: note = Y or V
  VARIANT 535: note = Y or V
  VARIANT 543: note = Y or V
  VARIANT 551: note = Y or V
  VARIANT 559: note = Y or V
  VARIANT 567: note = Y or V
  VARIANT 575: note = Y or V
  VARIANT 583: note = Y or V
  VARIANT 591: note = Y or V
  VARIANT 599: note = Y or V
  VARIANT 607: note = Y or V
  VARIANT 615: note = Y or V
  VARIANT 623: note = Y or V
  VARIANT 631: note = Y or V
  VARIANT 639: note = Y or V
  VARIANT 647: note = Y or V
  VARIANT 655: note = Y or V
  VARIANT 663: note = Y or V
  VARIANT 671: note = Y or V
  VARIANT 679: note = Y or V
  VARIANT 687: note = Y or V
  VARIANT 695: note = Y or V
  VARIANT 703: note = Y or V
  VARIANT 711: note = Y or V
  VARIANT 719: note = Y or V
  VARIANT 727: note = Y or V
  VARIANT 735: note = Y or V
  VARIANT 743: note = Y or V
  VARIANT 751: note = Y or V
  VARIANT 759: note = Y or V
  VARIANT 767: note = Y or V
  VARIANT 775: note = Y or V
  VARIANT 783: note = Y or V
  VARIANT 791: note = Y or V
  VARIANT 799: note = Y or V
  VARIANT 807: note = Y or V
  VARIANT 815: note = Y or V
  VARIANT 823: note = Y or V
  VARIANT 831: note = Y or V
  VARIANT 839: note = Y or V
  VARIANT 847: note = Y or V
  VARIANT 855: note = Y or V
  VARIANT 863: note = Y or V
  VARIANT 871: note = Y or V
  VARIANT 879: note = Y or V
  VARIANT 887: note = Y or V
  VARIANT 895: note = Y or V
  VARIANT 903: note = Y or V
  VARIANT 911: note = Y or V
  VARIANT 919: note = Y or V
  VARIANT 927: note = Y or V
  VARIANT 935: note = Y or V
  VARIANT 943: note = Y or V
  VARIANT 951: note = Y or V
  VARIANT 959: note = Y or V
  VARIANT 967: note = Y or V
  VARIANT 975: note = Y or V
  VARIANT 983: note = Y or V
  VARIANT 991: note = Y or V
  VARIANT 999: note = Y or V
  VARIANT 1007: note = Y or V
  VARIANT 1015: note = Y or V
  VARIANT 1023: note = Y or V
  VARIANT 1031: note = Y or V
  VARIANT 1039: note = Y or V
  VARIANT 1047: note = Y or V
  VARIANT 1055: note = Y or V
  VARIANT 1063: note = Y or V
  VARIANT 1071: note = Y or V
  VARIANT 1079: note = Y or V
  VARIANT 1087: note = Y or V
  VARIANT 1095: note = Y or V
  VARIANT 1103: note = Y or V
  VARIANT 1111: note = Y or V
  VARIANT 1119: note = Y or V
  VARIANT 1127: note = Y or V
  VARIANT 1135: note = Y or V
  VARIANT 1143: note = Y or V
  VARIANT 1151: note = Y or V
  VARIANT 1159: note = Y or V
  VARIANT 1167: note = Y or V
  VARIANT 1175: note = Y or V
  VARIANT 1183: note = Y or V
  VARIANT 1191: note = Y or V
  VARIANT 1199: note = Y or V
  VARIANT 1207: note = Y or V
  VARIANT 1215: note = Y or V
  VARIANT 1223: note = Y or V
  VARIANT 1231: note = Y or V
  VARIANT 1239: note = Y or V
  VARIANT 1247: note = Y or V
  VARIANT 1255: note = Y or V
  VARIANT 1263: note = Y or V
  VARIANT 1271: note = Y or V
  VARIANT 1279: note = Y or V
GRGDXPXXGRGDXPXXGRGDXPXXGRGDXPXXGRGDXPXXGRGDXPXXGRGDXPXXGRGDXPXXGRGDXPXXGRGDXPXXGRGDXPXXGRGDXPXXGRGDXPXXGRGDXPXXGRGDXPXXGRGDXPXXGRGDXPXXGRGDXPXXGRGDXPXXGRGDXPXXGRGDXPXXGRGDXPXXGRGDXPXXGRGDXPXXGRGDXPXXGRGDXPXXGRGDXPXXGRGDXPXXGRGDXPXXGRGDXPXXGRGDXPXXGRGDXPXXGRGDXPXXGRGDXPXXGRGDXPXXGRGDXPXXGRGDXPXXGRGDXPXXGRGDXPXXGRGDXPXXGRGDXPXXGRGDXPXXGRGDXPXXGRGDXPXXGRGDXPXXGRGDXPXXGRGDXPXXGRGDXPXXGRGDXPXXGRGDXPXXGRGDXPXXGRGDXPXXGRGDXPXXGRGDXPXXGRGDXPXXGRGDXPXXGRGDXPXXGRGDXPXXGRGDXPXXGRGDXPXXGRGDXPXXGRGDXPXXGRGDXPXXGRGDXPXXGRGDXPXXGRGDXPXXGRGDXPXXGRGDXPXXGRGDXPXXGRGDXPXXGRGDXPXXGRGDXPXXGRGDXPXXGRGDXPXXGRGDXPXXGRGDXPXXGRGDXPXXGRGDXPXXGRGDXPXXGRGDXPXXGRGDXPXXGRGDXPXXGRGDXPXXGRGDXPXXGRGDXPXXGRGDXPXXGRGDXPXXGRGDXPXXGRGDXPXXGRGDXPXXGRGDXPXXGRGDXPXXGRGDXPXXGRGDXPXXGRGDXPXXGRGDXPXXGRGDXPXXGRGDXPXXGRGDXPXXGRGDXPXXGRGDXPXXGRGDXPXXGRGDXPXXGRGDXPXXGRGDXPXXGRGDXPXXGRGDXPXXGRGDXPXXGRGDXPXXGRGDXPXXGRGDXPXXGRGDXPXXGRGDXPXXGRGDXPXXGRGDXPXXGRGDXPXXGRGDXPXXGRGDXPXXGRGDXPXXGRGDXPXXGRGDXPXXGRGDXPXXGRGDXPXXGRGDXPXXGRGDXPXXGRGDXPXXGRGDXPXXGRGDXPXXGRGDXPXXGRGDXPXXGRGDXPXXGRGDXPXXGRGDXPXXGRGDXPXXGRGDXPXXGRGDXPXXGRGDXPXXGRGDXPXXGRGDXPXXGRGDXPXXGRGDXPXXGRGDXPXXGRGDXPXXGRGDXPXXGRGDXPXXGRGDXPXXGRGDXPXXGRGDXPXXGRGDXPXXGRGDXPXXGRGDXPXXGRGDXPXXGRGDXPXXGRGDXPXXGRGDXPXXGRGDXPXXGRGDXPXXGRGDXPXXGRGDXPXXGRGDXPXX

SEQ ID NO: 29 - protein, 1280 aa, synthetic construct
  REPEAT 1..8: note = single repeat of (XXPXDGRG)m, wherein m is an integer between 10 and 160
  VARIANT 81..1280: note = up to 150 copies of (XXPXDGRG) can be deleted
  VARIANT 1: note = Q or S
  VARIANT 4: note = Q or S
  VARIANT 9: note = Q or S
  VARIANT 12: note = Q or S
  VARIANT 17: note = Q or S
  VARIANT 20: note = Q or S
  VARIANT 25: note = Q or S
  VARIANT 28: note = Q or S
  VARIANT 33: note = Q or S
  VARIANT 36: note = Q or S
  VARIANT 41: note = Q or S
  VARIANT 44: note = Q or S
  VARIANT 49: note = Q or S
  VARIANT 52: note = Q or S
  VARIANT 57: note = Q or S
  VARIANT 60: note = Q or S
  VARIANT 65: note = Q or S
  VARIANT 68: note = Q or S
  VARIANT 73: note = Q or S
  VARIANT 76: note = Q or S
  VARIANT 81: note = Q or S
  VARIANT 84: note = Q or S
  VARIANT 89: note = Q or S
  VARIANT 92: note = Q or S
  VARIANT 97: note = Q or S
  VARIANT 100: note = Q or S
  VARIANT 105: note = Q or S
  VARIANT 108: note = Q or S
  VARIANT 113: note = Q or S
  VARIANT 116: note = Q or S
  VARIANT 121: note = Q or S
  VARIANT 124: note = Q or S
  VARIANT 129: note = Q or S
  VARIANT 132: note = Q or S
  VARIANT 137: note = Q or S
  VARIANT 140: note = Q or S
  VARIANT 145: note = Q or S
  VARIANT 148: note = Q or S
  VARIANT 153: note = Q or S
  VARIANT 156: note = Q or S
  VARIANT 161: note = Q or S
  VARIANT 164: note = Q or S
  VARIANT 169: note = Q or S
  VARIANT 172: note = Q or S
  VARIANT 177: note = Q or S
  VARIANT 180: note = Q or S
  VARIANT 185: note = Q or S
  VARIANT 188: note = Q or S
  VARIANT 193: note = Q or S
  VARIANT 196: note = Q or S
  VARIANT 201: note = Q or S
  VARIANT 204: note = Q or S
  VARIANT 209: note = Q or S
  VARIANT 212: note = Q or S
  VARIANT 217: note = Q or S
  VARIANT 220: note = Q or S
  VARIANT 225: note = Q or S
  VARIANT 228: note = Q or S
  VARIANT 233: note = Q or S
  VARIANT 236: note = Q or S
  VARIANT 241: note = Q or S
  VARIANT 244: note = Q or S
  VARIANT 249: note = Q or S
  VARIANT 252: note = Q or S
  VARIANT 257: note = Q or S
  VARIANT 260: note = Q or S
  VARIANT 265: note = Q or S
  VARIANT 268: note = Q or S
  VARIANT 273: note = Q or S
  VARIANT 276: note = Q or S
  VARIANT 281: note = Q or S
  VARIANT 284: note = Q or S
  VARIANT 289: note = Q or S
  VARIANT 292: note = Q or S
  VARIANT 297: note = Q or S
  VARIANT 300: note = Q or S
  VARIANT 305: note = Q or S
  VARIANT 308: note = Q or S
  VARIANT 313: note = Q or S
  VARIANT 316: note = Q or S
  VARIANT 321: note = Q or S
  VARIANT 324: note = Q or S
  VARIANT 329: note = Q or S
  VARIANT 332: note = Q or S
  VARIANT 337: note = Q or S
  VARIANT 340: note = Q or S
  VARIANT 345: note = Q or S
  VARIANT 348: note = Q or S
  VARIANT 353: note = Q or S
  VARIANT 356: note = Q or S
  VARIANT 361: note = Q or S
  VARIANT 364: note = Q or S
  VARIANT 369: note = Q or S
  VARIANT 372: note = Q or S
  VARIANT 377: note = Q or S
  VARIANT 380: note = Q or S
  VARIANT 385: note = Q or S
  VARIANT 388: note = Q or S
  VARIANT 393: note = Q or S
  VARIANT 396: note = Q or S
  VARIANT 401: note = Q or S
  VARIANT 404: note = Q or S
  VARIANT 409: note = Q or S
  VARIANT 412: note = Q or S
  VARIANT 417: note = Q or S
  VARIANT 420: note = Q or S
  VARIANT 425: note = Q or S
  VARIANT 428: note = Q or S
  VARIANT 433: note = Q or S
  VARIANT 436: note = Q or S
  VARIANT 441: note = Q or S
  VARIANT 444: note = Q or S
  VARIANT 449: note = Q or S
  VARIANT 452: note = Q or S
  VARIANT 457: note = Q or S
  VARIANT 460: note = Q or S
  VARIANT 465: note = Q or S
  VARIANT 468: note = Q or S
  VARIANT 473: note = Q or S
  VARIANT 476: note = Q or S
  VARIANT 481: note = Q or S
  VARIANT 484: note = Q or S
  VARIANT 489: note = Q or S
  VARIANT 492: note = Q or S
  VARIANT 497: note = Q or S
  VARIANT 500: note = Q or S
  VARIANT 505: note = Q or S
  VARIANT 508: note = Q or S
  VARIANT 513: note = Q or S
  VARIANT 516: note = Q or S
  VARIANT 521: note = Q or S
  VARIANT 524: note = Q or S
  VARIANT 529: note = Q or S
  VARIANT 532: note = Q or S
  VARIANT 537: note = Q or S
  VARIANT 540: note = Q or S
  VARIANT 545: note = Q or S
  VARIANT 548: note = Q or S
  VARIANT 553: note = Q or S
  VARIANT 556: note = Q or S
  VARIANT 561: note = Q or S
  VARIANT 564: note = Q or S
  VARIANT 569: note = Q or S
  VARIANT 572: note = Q or S
  VARIANT 577: note = Q or S
  VARIANT 580: note = Q or S
  VARIANT 585: note = Q or S
  VARIANT 588: note = Q or S
  VARIANT 593: note = Q or S
  VARIANT 596: note = Q or S
  VARIANT 601: note = Q or S
  VARIANT 604: note = Q or S
  VARIANT 609: note = Q or S
  VARIANT 612: note = Q or S
  VARIANT 617: note = Q or S
  VARIANT 620: note = Q or S
  VARIANT 625: note = Q or S
  VARIANT 628: note = Q or S
  VARIANT 633: note = Q or S
  VARIANT 636: note = Q or S
  VARIANT 641: note = Q or S
  VARIANT 644: note = Q or S
  VARIANT 649: note = Q or S
  VARIANT 652: note = Q or S
  VARIANT 657: note = Q or S
  VARIANT 660: note = Q or S
  VARIANT 665: note = Q or S
  VARIANT 668: note = Q or S
  VARIANT 673: note = Q or S
  VARIANT 676: note = Q or S
  VARIANT 681: note = Q or S
  VARIANT 684: note = Q or S
  VARIANT 689: note = Q or S
  VARIANT 692: note = Q or S
  VARIANT 697: note = Q or S
  VARIANT 700: note = Q or S
  VARIANT 705: note = Q or S
  VARIANT 708: note = Q or S
  VARIANT 713: note = Q or S
  VARIANT 716: note = Q or S
  VARIANT 721: note = Q or S
  VARIANT 724: note = Q or S
  VARIANT 729: note = Q or S
  VARIANT 732: note = Q or S
  VARIANT 737: note = Q or S
  VARIANT 740: note = Q or S
  VARIANT 745: note = Q or S
  VARIANT 748: note = Q or S
  VARIANT 753: note = Q or S
  VARIANT 756: note = Q or S
  VARIANT 761: note = Q or S
  VARIANT 764: note = Q or S
  VARIANT 769: note = Q or S
  VARIANT 772: note = Q or S
  VARIANT 777: note = Q or S
  VARIANT 780: note = Q or S
  VARIANT 785: note = Q or S
  VARIANT 788: note = Q or S
  VARIANT 793: note = Q or S
  VARIANT 796: note = Q or S
  VARIANT 801: note = Q or S
  VARIANT 804: note = Q or S
  VARIANT 809: note = Q or S
  VARIANT 812: note = Q or S
  VARIANT 817: note = Q or S
  VARIANT 820: note = Q or S
  VARIANT 825: note = Q or S
  VARIANT 828: note = Q or S
  VARIANT 833: note = Q or S
  VARIANT 836: note = Q or S
  VARIANT 841: note = Q or S
  VARIANT 844: note = Q or S
  VARIANT 849: note = Q or S
  VARIANT 852: note = Q or S
  VARIANT 857: note = Q or S
  VARIANT 860: note = Q or S
  VARIANT 865: note = Q or S
  VARIANT 868: note = Q or S
  VARIANT 873: note = Q or S
  VARIANT 876: note = Q or S
  VARIANT 881: note = Q or S
  VARIANT 884: note = Q or S
  VARIANT 889: note = Q or S
  VARIANT 892: note = Q or S
  VARIANT 897: note = Q or S
  VARIANT 900: note = Q or S
  VARIANT 905: note = Q or S
  VARIANT 908: note = Q or S
  VARIANT 913: note = Q or S
  VARIANT 916: note = Q or S
  VARIANT 921: note = Q or S
  VARIANT 924: note = Q or S
  VARIANT 929: note = Q or S
  VARIANT 932: note = Q or S
  VARIANT 937: note = Q or S
  VARIANT 940: note = Q or S
  VARIANT 945: note = Q or S
  VARIANT 948: note = Q or S
  VARIANT 953: note = Q or S
  VARIANT 956: note = Q or S
  VARIANT 961: note = Q or S
  VARIANT 964: note = Q or S
  VARIANT 969: note = Q or S
  VARIANT 972: note = Q or S
  VARIANT 977: note = Q or S
  VARIANT 980: note = Q or S
  VARIANT 985: note = Q or S
  VARIANT 988: note = Q or S
  VARIANT 993: note = Q or S
  VARIANT 996: note = Q or S
  VARIANT 1001: note = Q or S
  VARIANT 1004: note = Q or S
  VARIANT 1009: note = Q or S
  VARIANT 1012: note = Q or S
  VARIANT 1017: note = Q or S
  VARIANT 1020: note = Q or S
  VARIANT 1025: note = Q or S
  VARIANT 1028: note = Q or S
  VARIANT 1033: note = Q or S
  VARIANT 1036: note = Q or S
  VARIANT 1041: note = Q or S
  VARIANT 1044: note = Q or S
  VARIANT 1049: note = Q or S
  VARIANT 1052: note = Q or S
  VARIANT 1057: note = Q or S
  VARIANT 1060: note = Q or S
  VARIANT 1065: note = Q or S
  VARIANT 1068: note = Q or S
  VARIANT 1073: note = Q or S
  VARIANT 1076: note = Q or S
  VARIANT 1081: note = Q or S
  VARIANT 1084: note = Q or S
  VARIANT 1089: note = Q or S
  VARIANT 1092: note = Q or S
  VARIANT 1097: note = Q or S
  VARIANT 1100: note = Q or S
  VARIANT 1105: note = Q or S
  VARIANT 1108: note = Q or S
  VARIANT 1113: note = Q or S
  VARIANT 1116: note = Q or S
  VARIANT 1121: note = Q or S
  VARIANT 1124: note = Q or S
  VARIANT 1129: note = Q or S
  VARIANT 1132: note = Q or S
  VARIANT 1137: note = Q or S
  VARIANT 1140: note = Q or S
  VARIANT 1145: note = Q or S
  VARIANT 1148: note = Q or S
  VARIANT 1153: note = Q or S
  VARIANT 1156: note = Q or S
  VARIANT 1161: note = Q or S
  VARIANT 1164: note = Q or S
  VARIANT 1169: note = Q or S
  VARIANT 1172: note = Q or S
  VARIANT 1177: note = Q or S
  VARIANT 1180: note = Q or S
  VARIANT 1185: note = Q or S
  VARIANT 1188: note = Q or S
  VARIANT 1193: note = Q or S
  VARIANT 1196: note = Q or S
  VARIANT 1201: note = Q or S
  VARIANT 1204: note = Q or S
  VARIANT 1209: note = Q or S
  VARIANT 1212: note = Q or S
  VARIANT 1217: note = Q or S
  VARIANT 1220: note = Q or S
  VARIANT 1225: note = Q or S
  VARIANT 1228: note = Q or S
  VARIANT 1233: note = Q or S
  VARIANT 1236: note = Q or S
  VARIANT 1241: note = Q or S
  VARIANT 1244: note = Q or S
  VARIANT 1249: note = Q or S
  VARIANT 1252: note = Q or S
  VARIANT 1257: note = Q or S
  VARIANT 1260: note = Q or S
  VARIANT 1265: note = Q or S
  VARIANT 1268: note = Q or S
  VARIANT 1273: note = Q or S
  VARIANT 1276: note = Q or S
  VARIANT 2: note = Y or V
  VARIANT 10: note = Y or V
  VARIANT 18: note = Y or V
  VARIANT 26: note = Y or V
  VARIANT 34: note = Y or V
  VARIANT 42: note = Y or V
  VARIANT 50: note = Y or V
  VARIANT 58: note = Y or V
  VARIANT 66: note = Y or V
  VARIANT 74: note = Y or V
  VARIANT 82: note = Y or V
  VARIANT 90: note = Y or V
  VARIANT 98: note = Y or V
  VARIANT 106: note = Y or V
  VARIANT 114: note = Y or V
  VARIANT 122: note = Y or V
  VARIANT 130: note = Y or V
  VARIANT 138: note = Y or V
  VARIANT 146: note = Y or V
  VARIANT 154: note = Y or V
  VARIANT 162: note = Y or V
  VARIANT 170: note = Y or V
  VARIANT 178: note = Y or V
  VARIANT 186: note = Y or V
  VARIANT 194: note = Y or V
  VARIANT 202: note = Y or V
  VARIANT 210: note = Y or V
  VARIANT 218: note = Y or V
  VARIANT 226: note = Y or V
  VARIANT 234: note = Y or V
  VARIANT 242: note = Y or V
  VARIANT 250: note = Y or V
  VARIANT 258: note = Y or V
  VARIANT 266: note = Y or V
  VARIANT 274: note = Y or V
  VARIANT 282: note = Y or V
  VARIANT 290: note = Y or V
  VARIANT 298: note = Y or V
  VARIANT 306: note = Y or V
  VARIANT 314: note = Y or V
  VARIANT 322: note = Y or V
  VARIANT 330: note = Y or V
  VARIANT 338: note = Y or V
  VARIANT 346: note = Y or V
  VARIANT 354: note = Y or V
  VARIANT 362: note = Y or V
  VARIANT 370: note = Y or V
  VARIANT 378: note = Y or V
  VARIANT 386: note = Y or V
  VARIANT 394: note = Y or V
  VARIANT 402: note = Y or V
  VARIANT 410: note = Y or V
  VARIANT 418: note = Y or V
  VARIANT 426: note = Y or V
  VARIANT 434: note = Y or V
  VARIANT 442: note = Y or V
  VARIANT 450: note = Y or V
  VARIANT 458: note = Y or V
  VARIANT 466: note = Y or V
  VARIANT 474: note = Y or V
  VARIANT 482: note = Y or V
  VARIANT 490: note = Y or V
  VARIANT 498: note = Y or V
  VARIANT 506: note = Y or V
  VARIANT 514: note = Y or V
  VARIANT 522: note = Y or V
  VARIANT 530: note = Y or V
  VARIANT 538: note = Y or V
  VARIANT 546: note = Y or V
  VARIANT 554: note = Y or V
  VARIANT 562: note = Y or V
  VARIANT 570: note = Y or V
  VARIANT 578: note = Y or V
  VARIANT 586: note = Y or V
  VARIANT 594: note = Y or V
  VARIANT 602: note = Y or V
  VARIANT 610: note = Y or V
  VARIANT 618: note = Y or V
  VARIANT 626: note = Y or V
  VARIANT 634: note = Y or V
  VARIANT 642: note = Y or V
  VARIANT 650: note = Y or V
  VARIANT 658: note = Y or V
  VARIANT 666: note = Y or V
  VARIANT 674: note = Y or V
  VARIANT 682: note = Y or V
  VARIANT 690: note = Y or V
  VARIANT 698: note = Y or V
  VARIANT 706: note = Y or V
  VARIANT 714: note = Y or V
  VARIANT 722: note = Y or V
  VARIANT 730: note = Y or V
  VARIANT 738: note = Y or V
  VARIANT 746: note = Y or V
  VARIANT 754: note = Y or V
  VARIANT 762: note = Y or V
  VARIANT 770: note = Y or V
  VARIANT 778: note = Y or V
  VARIANT 786: note = Y or V
  VARIANT 794: note = Y or V
  VARIANT 802: note = Y or V
  VARIANT 810: note = Y or V
  VARIANT 818: note = Y or V
  VARIANT 826: note = Y or V
  VARIANT 834: note = Y or V
  VARIANT 842: note = Y or V
  VARIANT 850: note = Y or V
  VARIANT 858: note = Y or V
  VARIANT 866: note = Y or V
  VARIANT 874: note = Y or V
  VARIANT 882: note = Y or V
  VARIANT 890: note = Y or V
  VARIANT 898: note = Y or V
  VARIANT 906: note = Y or V
  VARIANT 914: note = Y or V
  VARIANT 922: note = Y or V
  VARIANT 930: note = Y or V
  VARIANT 938: note = Y or V
  VARIANT 946: note = Y or V
  VARIANT 954: note = Y or V
  VARIANT 962: note = Y or V
  VARIANT 970: note = Y or V
  VARIANT 978: note = Y or V
  VARIANT 986: note = Y or V
  VARIANT 994: note = Y or V
  VARIANT 1002: note = Y or V
  VARIANT 1010: note = Y or V
  VARIANT 1018: note = Y or V
  VARIANT 1026: note = Y or V
  VARIANT 1034: note = Y or V
  VARIANT 1042: note = Y or V
  VARIANT 1050: note = Y or V
  VARIANT 1058: note = Y or V
  VARIANT 1066: note = Y or V
  VARIANT 1074: note = Y or V
  VARIANT 1082: note = Y or V
  VARIANT 1090: note = Y or V
  VARIANT 1098: note = Y or V
  VARIANT 1106: note = Y or V
  VARIANT 1114: note = Y or V
  VARIANT 1122: note = Y or V
  VARIANT 1130: note = Y or V
  VARIANT 1138: note = Y or V
  VARIANT 1146: note = Y or V
  VARIANT 1154: note = Y or V
  VARIANT 1162: note = Y or V
  VARIANT 1170: note = Y or V
  VARIANT 1178: note = Y or V
  VARIANT 1186: note = Y or V
  VARIANT 1194: note = Y or V
  VARIANT 1202: note = Y or V
  VARIANT 1210: note = Y or V
  VARIANT 1218: note = Y or V
  VARIANT 1226: note = Y or V
  VARIANT 1234: note = Y or V
  VARIANT 1242: note = Y or V
  VARIANT 1250: note = Y or V
  VARIANT 1258: note = Y or V
  VARIANT 1266: note = Y or V
  VARIANT 1274: note = Y or V
XXPXDGRGXXPXDGRGXXPXDGRGXXPXDGRGXXPXDGRGXXPXDGRGXXPXDGRGXXPXDGRGXXPXDGRGXXPXDGRGXXPXDGRGXXPXDGRGXXPXDGRGXXPXDGRGXXPXDGRGXXPXDGRGXXPXDGRGXXPXDGRGXXPXDGRGXXPXDGRGXXPXDGRGXXPXDGRGXXPXDGRGXXPXDGRGXXPXDGRGXXPXDGRGXXPXDGRGXXPXDGRGXXPXDGRGXXPXDGRGXXPXDGRGXXPXDGRGXXPXDGRGXXPXDGRGXXPXDGRGXXPXDGRGXXPXDGRGXXPXDGRGXXPXDGRGXXPXDGRGXXPXDGRGXXPXDGRGXXPXDGRGXXPXDGRGXXPXDGRGXXPXDGRGXXPXDGRGXXPXDGRGXXPXDGRGXXPXDGRGXXPXDGRGXXPXDGRGXXPXDGRGXXPXDGRGXXPXDGRGXXPXDGRGXXPXDGRGXXPXDGRGXXPXDGRGXXPXDGRGXXPXDGRGXXPXDGRGXXPXDGRGXXPXDGRGXXPXDGRGXXPXDGRGXXPXDGRGXXPXDGRGXXPXDGRGXXPXDGRGXXPXDGRGXXPXDGRGXXPXDGRGXXPXDGRGXXPXDGRGXXPXDGRGXXPXDGRGXXPXDGRGXXPXDGRGXXPXDGRGXXPXDGRGXXPXDGRGXXPXDGRGXXPXDGRGXXPXDGRGXXPXDGRGXXPXDGRGXXPXDGRGXXPXDGRGXXPXDGRGXXPXDGRGXXPXDGRGXXPXDGRGXXPXDGRGXXPXDGRGXXPXDGRGXXPXDGRGXXPXDGRGXXPXDGRGXXPXDGRGXXPXDGRGXXPXDGRGXXPXDGRGXXPXDGRGXXPXDGRGXXPXDGRGXXPXDGRGXXPXDGRGXXPXDGRGXXPXDGRGXXPXDGRGXXPXDGRGXXPXDGRGXXPXDGRGXXPXDGRGXXPXDGRGXXPXDGRGXXPXDGRGXXPXDGRGXXPXDGRGXXPXDGRGXXPXDGRGXXPXDGRGXXPXDGRGXXPXDGRGXXPXDGRGXXPXDGRGXXPXDGRGXXPXDGRGXXPXDGRGXXPXDGRGXXPXDGRGXXPXDGRGXXPXDGRGXXPXDGRGXXPXDGRGXXPXDGRGXXPXDGRGXXPXDGRGXXPXDGRGXXPXDGRGXXPXDGRGXXPXDGRGXXPXDGRGXXPXDGRGXXPXDGRGXXPXDGRGXXPXDGRGXXPXDGRGXXPXDGRGXXPXDGRGXXPXDGRGXXPXDGRGXXPXDGRGXXPXDGRGXXPXDGRGXXPXDGRGXXPXDGRGXXPXDGRGXXPXDGRG

SEQ ID NO: 30 - protein, 320 aa, synthetic construct
  VARIANT 5: note = Q or S
  VARIANT 8: note = Q or S
  VARIANT 13: note = Q or S
  VARIANT 16: note = Q or S
  VARIANT 21: note = Q or S
  VARIANT 24: note = Q or S
  VARIANT 29: note = Q or S
  VARIANT 32: note = Q or S
  VARIANT 37: note = Q or S
  VARIANT 40: note = Q or S
  VARIANT 45: note = Q or S
  VARIANT 48: note = Q or S
  VARIANT 53: note = Q or S
  VARIANT 56: note = Q or S
  VARIANT 61: note = Q or S
  VARIANT 64: note = Q or S
  VARIANT 69: note = Q or S
  VARIANT 72: note = Q or S
  VARIANT 77: note = Q or S
  VARIANT 80: note = Q or S
  VARIANT 85: note = Q or S
  VARIANT 88: note = Q or S
  VARIANT 93: note = Q or S
  VARIANT 96: note = Q or S
  VARIANT 101: note = Q or S
  VARIANT 104: note = Q or S
  VARIANT 109: note = Q or S
  VARIANT 112: note = Q or S
  VARIANT 117: note = Q or S
  VARIANT 120: note = Q or S
  VARIANT 125: note = Q or S
  VARIANT 128: note = Q or S
  VARIANT 133: note = Q or S
  VARIANT 136: note = Q or S
  VARIANT 141: note = Q or S
  VARIANT 144: note = Q or S
  VARIANT 149: note = Q or S
  VARIANT 152: note = Q or S
  VARIANT 157: note = Q or S
  VARIANT 160: note = Q or S
  VARIANT 165: note = Q or S
  VARIANT 168: note = Q or S
  VARIANT 173: note = Q or S
  VARIANT 176: note = Q or S
  VARIANT 181: note = Q or S
  VARIANT 184: note = Q or S
  VARIANT 189: note = Q or S
  VARIANT 192: note = Q or S
  VARIANT 197: note = Q or S
  VARIANT 200: note = Q or S
  VARIANT 205: note = Q or S
  VARIANT 208: note = Q or S
  VARIANT 213: note = Q or S
  VARIANT 216: note = Q or S
  VARIANT 221: note = Q or S
  VARIANT 224: note = Q or S
  VARIANT 229: note = Q or S
  VARIANT 232: note = Q or S
  VARIANT 237: note = Q or S
  VARIANT 240: note = Q or S
  VARIANT 245: note = Q or S
  VARIANT 248: note = Q or S
  VARIANT 253: note = Q or S
  VARIANT 256: note = Q or S
  VARIANT 261: note = Q or S
  VARIANT 264: note = Q or S
  VARIANT 269: note = Q or S
  VARIANT 272: note = Q or S
  VARIANT 277: note = Q or S
  VARIANT 280: note = Q or S
  VARIANT 285: note = Q or S
  VARIANT 288: note = Q or S
  VARIANT 293: note = Q or S
  VARIANT 296: note = Q or S
  VARIANT 301: note = Q or S
  VARIANT 304: note = Q or S
  VARIANT 309: note = Q or S
  VARIANT 312: note = Q or S
  VARIANT 317: note = Q or S
  VARIANT 320: note = Q or S
  VARIANT 7: note = Y or V
  VARIANT 15: note = Y or V
  VARIANT 23: note = Y or V
  VARIANT 31: note = Y or V
  VARIANT 39: note = Y or V
  VARIANT 47: note = Y or V
  VARIANT 55: note = Y or V
  VARIANT 63: note = Y or V
  VARIANT 71: note = Y or V
  VARIANT 79: note = Y or V
  VARIANT 87: note = Y or V
  VARIANT 95: note = Y or V
  VARIANT 103: note = Y or V
  VARIANT 111: note = Y or V
  VARIANT 119: note = Y or V
  VARIANT 127: note = Y or V
  VARIANT 135: note = Y or V
  VARIANT 143: note = Y or V
  VARIANT 151: note = Y or V
  VARIANT 159: note = Y or V
  VARIANT 167: note = Y or V
  VARIANT 175: note = Y or V
  VARIANT 183: note = Y or V
  VARIANT 191: note = Y or V
  VARIANT 199: note = Y or V
  VARIANT 207: note = Y or V
  VARIANT 215: note = Y or V
  VARIANT 223: note = Y or V
  VARIANT 231: note = Y or V
  VARIANT 239: note = Y or V
  VARIANT 247: note = Y or V
  VARIANT 255: note = Y or V
  VARIANT 263: note = Y or V
  VARIANT 271: note = Y or V
  VARIANT 279: note = Y or V
  VARIANT 287: note = Y or V
  VARIANT 295: note = Y or V
  VARIANT 303: note = Y or V
  VARIANT 311: note = Y or V
  VARIANT 319: note = Y or V
GRGDXPXXGRGDXPXXGRGDXPXXGRGDXPXXGRGDXPXXGRGDXPXXGRGDXPXXGRGDXPXXGRGDXPXXGRGDXPXXGRGDXPXXGRGDXPXXGRGDXPXXGRGDXPXXGRGDXPXXGRGDXPXXGRGDXPXXGRGDXPXXGRGDXPXXGRGDXPXXGRGDXPXXGRGDXPXXGRGDXPXXGRGDXPXXGRGDXPXXGRGDXPXXGRGDXPXXGRGDXPXXGRGDXPXXGRGDXPXXGRGDXPXXGRGDXPXXGRGDXPXXGRGDXPXXGRGDXPXXGRGDXPXXGRGDXPXXGRGDXPXXGRGDXPXXGRGDXPXX

SEQ ID NO: 31 - protein, 400 aa, synthetic construct; identical to SEQ ID NO: 27

SEQ ID NO: 32 - protein, 720 aa, synthetic construct
GRGDQPYQGRGDQPYQGRGDQPYQGRGDQPYQGRGDQPYQGRGDQPYQGRGDQPYQGRGDQPYQGRGDQPYQGRGDQPYQGRGDQPYQGRGDQPYQGRGDQPYQGRGDQPYQGRGDQPYQGRGDQPYQGRGDQPYQGRGDQPYQGRGDQPYQGRGDQPYQGRGDQPYQGRGDQPYQGRGDQPYQGRGDQPYQGRGDQPYQGRGDQPYQGRGDQPYQGRGDQPYQGRGDQPYQGRGDQPYQGRGDQPYQGRGDQPYQGRGDQPYQGRGDQPYQGRGDQPYQGRGDQPYQGRGDQPYQGRGDQPYQGRGDQPYQGRGDQPYQGVGVPGVGVPGVGVPGVGVPGVGVPGVGVPGVGVPGVGVPGVGVPGVGVPGVGVPGVGVPGVGVPGVGVPGVGVPGVGVPGVGVPGVGVPGVGVPGVGVPGVGVPGVGVPGVGVPGVGVPGVGVPGVGVPGVGVPGVGVPGVGVPGVGVPGVGVPGVGVPGVGVPGVGVPGVGVPGVGVPGVGVPGVGVPGVGVPGVGVPGVGVPGVGVPGVGVPGVGVPGVGVPGVGVPGVGVPGVGVPGVGVPGVGVPGVGVPGVGVPGVGVPGVGVPGVGVPGVGVPGVGVPGVGVPGVGVPGVGVPGVGVPGVGVPGVGVPGVGVPGVGVPGVGVPGVGVPGVGVPGVGVPGVGVPGVGVPGVGVPGVGVPGVGVPGVGVPGVGVPGVGVPGVGVPGVGVPGVGVP

SEQ ID NO: 33 - protein, 400 aa, synthetic construct
GVGVPGLGVPGVGVPGLGVPGVGVPGVGVPGLGVPGVGVPGLGVPGVGVPGVGVPGLGVPGVGVPGLGVPGVGVPGVGVPGLGVPGVGVPGLGVPGVGVPGVGVPGLGVPGVGVPGLGVPGVGVPGVGVPGLGVPGVGVPGLGVPGVGVPGVGVPGLGVPGVGVPGLGVPGVGVPGVGVPGLGVPGVGVPGLGVPGVGVPGVGVPGLGVPGVGVPGLGVPGVGVPGVGVPGLGVPGVGVPGLGVPGVGVPGVGVPGLGVPGVGVPGLGVPGVGVPGVGVPGLGVPGVGVPGLGVPGVGVPGVGVPGLGVPGVGVPGLGVPGVGVPGVGVPGLGVPGVGVPGLGVPGVGVPGVGVPGLGVPGVGVPGLGVPGVGVPGVGVPGLGVPGVGVPGLGVPGVGVP

SEQ ID NO: 34 - protein, 400 aa, synthetic construct; identical to SEQ ID NO: 33

SEQ ID NO: 35 - protein, 320 aa, synthetic construct
GRGDSPYSGRGDSPYSGRGDSPYSGRGDSPYSGRGDSPYSGRGDSPYSGRGDSPYSGRGDSPYSGRGDSPYSGRGDSPYSGRGDSPYSGRGDSPYSGRGDSPYSGRGDSPYSGRGDSPYSGRGDSPYSGRGDSPYSGRGDSPYSGRGDSPYSGRGDSPYSGRGDSPYSGRGDSPYSGRGDSPYSGRGDSPYSGRGDSPYSGRGDSPYSGRGDSPYSGRGDSPYSGRGDSPYSGRGDSPYSGRGDSPYSGRGDSPYSGRGDSPYSGRGDSPYSGRGDSPYSGRGDSPYSGRGDSPYSGRGDSPYSGRGDSPYSGRGDSPYS

SEQ ID NO: 36 - protein, 401 aa, synthetic construct
GVGVPGLGVPGVGVPGLGVPGVGVPGVGVPGLGVPGVGVPGLGVPGVGVPGVGVPGLGVPGVGVPGLGVPGVGVPGVGVPGLGVPGVGVPGLGVPGVGVPGVGVPGLGVPGVGVPGLGVPGVGVPGVGVPGLGVPGVGVPGLGVPGVGVPGVGVPGLGVPGVGVPGLGVPGVGVPGVGVPGLGVPGVGVPGLGVPGVGVPGVGVPGLGVPGVGVPGLGVPGVGVPGVGVPGLGVPGVGVPGLGVPGVGVPGVGVPGLGVPGVGVPGLGVPGVGVPGVGVPGLGVPGVGVPGLGVPGVGVPGVGVPGLGVPGVGVPGLGVPGVGVPGVGVPGLGVPGVGVPGLGVPGVGVPGVGVPGLGVPGVGVPGLGVPGVGVPGVGVPGLGVPGVGVPGLGVPGVGVPY

SEQ ID NO: 37 - protein, 401 aa, synthetic construct
GVGVPGVGVPGAGVPGVGVPGVGVPGVGVPGVGVPGAGVPGVGVPGVGVPGVGVPGVGVPGAGVPGVGVPGVGVPGVGVPGVGVPGAGVPGVGVPGVGVPGVGVPGVGVPGAGVPGVGVPGVGVPGVGVPGVGVPGAGVPGVGVPGVGVPGVGVPGVGVPGAGVPGVGVPGVGVPGVGVPGVGVPGAGVPGVGVPGVGVPGVGVPGVGVPGAGVPGVGVPGVGVPGVGVPGVGVPGAGVPGVGVPGVGVPGVGVPGVGVPGAGVPGVGVPGVGVPGVGVPGVGVPGAGVPGVGVPGVGVPGVGVPGVGVPGAGVPGVGVPGVGVPGVGVPGVGVPGAGVPGVGVPGVGVPGVGVPGVGVPGAGVPGVGVPGVGVPGVGVPGVGVPGAGVPGVGVPGVGVPY

SEQ ID NO: 38 - protein, 400 aa, synthetic construct; identical to SEQ ID NO: 33

SEQ ID NO: 39 - protein, 400 aa, synthetic construct; identical to SEQ ID NO: 19

SEQ ID NO: 40 - protein, 350 aa, synthetic construct
GVGPVGAGPVGVGPVGAGPVGVGPVGVGPVGAGPVGVGPVGAGPVGVGPVGVGPVGAGPVGVGPVGAGPVGVGPVGVGPVGAGPVGVGPVGAGPVGVGPVGVGPVGAGPVGVGPVGAGPVGVGPVGVGPVGAGPVGVGPVGAGPVGVGPVGVGPVGAGPVGVGPVGAGPVGVGPVGVGPVGAGPVGVGPVGAGPVGVGPVGVGPVGAGPVGVGPVGAGPVGVGPVGVGPVGAGPVGVGPVGAGPVGVGPVGVGPVGAGPVGVGPVGAGPVGVGPVGVGPVGAGPVGVGPVGAGPVGVGPVGVGPVGAGPVGVGPVGAGPVGVGPVGVGPVGAGPVGVGPVGAGPVGVGPV

SEQ ID NO: 41 - protein, 400 aa, synthetic construct
GVGPVGAGPVGVGPVGAGPVGVGPVGVGPVGAGPVGVGPVGAGPVGVGPVGVGPVGAGPVGVGPVGAGPVGVGPVGVGPVGAGPVGVGPVGAGPVGVGPVGVGPVGAGPVGVGPVGAGPVGVGPVGVGPVGAGPVGVGPVGAGPVGVGPVGVGPVGAGPVGVGPVGAGPVGVGPVGVGPVGAGPVGVGPVGAGPVGVGPVGVGPVGAGPVGVGPVGAGPVGVGPVGVGPVGAGPVGVGPVGAGPVGVGPVGVGPVGAGPVGVGPVGAGPVGVGPVGVGPVGAGPVGVGPVGAGPVGVGPVGVGPVGAGPVGVGPVGAGPVGVGPVGVGPVGAGPVGVGPVGAGPVGVGPVGVGPVGAGPVGVGPVGAGPVGVGPVGVGPVGAGPVGVGPVGAGPVGVGPV

SEQ ID NO: 42 - protein, 400 aa, synthetic construct; identical to SEQ ID NO: 19

SEQ ID NO: 43 - protein, 400 aa, synthetic construct; identical to SEQ ID NO: 33

SEQ ID NO: 44 - protein, 404 aa, synthetic construct
SKGPGVGVPGLGVPGVGVPGLGVPGVGVPGVGVPGLGVPGVGVPGLGVPGVGVPGVGVPGLGVPGVGVPGLGVPGVGVPGVGVPGLGVPGVGVPGLGVPGVGVPGVGVPGLGVPGVGVPGLGVPGVGVPGVGVPGLGVPGVGVPGLGVPGVGVPGVGVPGLGVPGVGVPGLGVPGVGVPGVGVPGLGVPGVGVPGLGVPGVGVPGVGVPGLGVPGVGVPGLGVPGVGVPGVGVPGLGVPGVGVPGLGVPGVGVPGVGVPGLGVPGVGVPGLGVPGVGVPGVGVPGLGVPGVGVPGLGVPGVGVPGVGVPGLGVPGVGVPGLGVPGVGVPGVGVPGLGVPGVGVPGLGVPGVGVPGVGVPGLGVPGVGVPGLGVPGVGVPGVGVPGLGVPGVGVPGLGVPGVGVP

SEQ ID NO: 45 - protein, 404 aa, synthetic construct
SKGPGVGVPGVGVPGAGVPGVGVPGVGVPGVGVPGVGVPGAGVPGVGVPGVGVPGVGVPGVGVPGAGVPGVGVPGVGVPGVGVPGVGVPGAGVPGVGVPGVGVPGVGVPGVGVPGAGVPGVGVPGVGVPGVGVPGVGVPGAGVPGVGVPGVGVPGVGVPGVGVPGAGVPGVGVPGVGVPGVGVPGVGVPGAGVPGVGVPGVGVPGVGVPGVGVPGAGVPGVGVPGVGVPGVGVPGVGVPGAGVPGVGVPGVGVPGVGVPGVGVPGAGVPGVGVPGVGVPGVGVPGVGVPGAGVPGVGVPGVGVPGVGVPGVGVPGAGVPGVGVPGVGVPGVGVPGVGVPGAGVPGVGVPGVGVPGVGVPGVGVPGAGVPGVGVPGVGVPGVGVPGVGVPGAGVPGVGVPGVGVP

SEQ ID NO: 46 - protein, 354 aa, synthetic construct
SKGPGVGPVGAGPVGVGPVGAGPVGVGPVGVGPVGAGPVGVGPVGAGPVGVGPVGVGPVGAGPVGVGPVGAGPVGVGPVGVGPVGAGPVGVGPVGAGPVGVGPVGVGPVGAGPVGVGPVGAGPVGVGPVGVGPVGAGPVGVGPVGAGPVGVGPVGVGPVGAGPVGVGPVGAGPVGVGPVGVGPVGAGPVGVGPVGAGPVGVGPVGVGPVGAGPVGVGPVGAGPVGVGPVGVGPVGAGPVGVGPVGAGPVGVGPVGVGPVGAGPVGVGPVGAGPVGVGPVGVGPVGAGPVGVGPVGAGPVGVGPVGVGPVGAGPVGVGPVGAGPVGVGPVGVGPVGAGPVGVGPVGAGPVGVGPV

SEQ ID NO: 47 - protein, 400 aa, synthetic construct; identical to SEQ ID NO: 33

SEQ ID NO: 48 - protein, 400 aa, synthetic construct; identical to SEQ ID NO: 19

SEQ ID NO: 49 - protein, 350 aa, synthetic construct; identical to SEQ ID NO: 40

SEQ ID NO: 50 - protein, 405 aa, synthetic construct
MSKGPGVGVPGLGVPGVGVPGLGVPGVGVPGVGVPGLGVPGVGVPGLGVPGVGVPGVGVPGLGVPGVGVPGLGVPGVGVPGVGVPGLGVPGVGVPGLGVPGVGVPGVGVPGLGVPGVGVPGLGVPGVGVPGVGVPGLGVPGVGVPGLGVPGVGVPGVGVPGLGVPGVGVPGLGVPGVGVPGVGVPGLGVPGVGVPGLGVPGVGVPGVGVPGLGVPGVGVPGLGVPGVGVPGVGVPGLGVPGVGVPGLGVPGVGVPGVGVPGLGVPGVGVPGLGVPGVGVPGVGVPGLGVPGVGVPGLGVPGVGVPGVGVPGLGVPGVGVPGLGVPGVGVPGVGVPGLGVPGVGVPGLGVPGVGVPGVGVPGLGVPGVGVPGLGVPGVGVPGVGVPGLGVPGVGVPGLGVPGVGVP

SEQ ID NO: 51 - protein, 405 aa, synthetic construct
MSKGPGVGVPGVGVPGAGVPGVGVPGVGVPGVGVPGVGVPGAGVPGVGVPGVGVPGVGVPGVGVPGAGVPGVGVPGVGVPGVGVPGVGVPGAGVPGVGVPGVGVPGVGVPGVGVPGAGVPGVGVPGVGVPGVGVPGVGVPGAGVPGVGVPGVGVPGVGVPGVGVPGAGVPGVGVPGVGVPGVGVPGVGVPGAGVPGVGVPGVGVPGVGVPGVGVPGAGVPGVGVPGVGVPGVGVPGVGVPGAGVPGVGVPGVGVPGVGVPGVGVPGAGVPGVGVPGVGVPGVGVPGVGVPGAGVPGVGVPGVGVPGVGVPGVGVPGAGVPGVGVPGVGVPGVGVPGVGVPGAGVPGVGVPGVGVPGVGVPGVGVPGAGVPGVGVPGVGVPGVGVPGVGVPGAGVPGVGVPGVGVP

SEQ ID NO: 52 - protein, 355 aa, synthetic construct
MSKGPGVGPVGAGPVGVGPVGAGPVGVGPVGVGPVGAGPVGVGPVGAGPVGVGPVGVGPVGAGPVGVGPVGAGPVGVGPVGVGPVGAGPVGVGPVGAGPVGVGPVGVGPVGAGPVGVGPVGAGPVGVGPVGVGPVGAGPVGVGPVGAGPVGVGPVGVGPVGAGPVGVGPVGAGPVGVGPVGVGPVGAGPVGVGPVGAGPVGVGPVGVGPVGAGPVGVGPVGAGPVGVGPVGVGPVGAGPVGVGPVGAGPVGVGPVGVGPVGAGPVGVGPVGAGPVGVGPVGVGPVGAGPVGVGPVGAGPVGVGPVGVGPVGAGPVGVGPVGAGPVGVGPVGVGPVGAGPVGVGPVGAGPVGVGPV

SEQ ID NO: 53 - protein, 201 aa, synthetic construct
GVGVPGVGVPGAGVPGVGVPGVGVPGVGVPGVGVPGAGVPGVGVPGVGVPGVGVPGVGVPGAGVPGVGVPGVGVPGVGVPGVGVPGAGVPGVGVPGVGVPGVGVPGVGVPGAGVPGVGVPGVGVPGVGVPGVGVPGAGVPGVGVPGVGVPGVGVPGVGVPGAGVPGVGVPGVGVPGVGVPGVGVPGAGVPGVGVPGVGVPY

SEQ ID NO: 54 - protein, 200 aa, synthetic construct
GVGVPGVGVPGAGVPGVGVPGVGVPGVGVPGVGVPGAGVPGVGVPGVGVPGVGVPGVGVPGAGVPGVGVPGVGVPGVGVPGVGVPGAGVPGVGVPGVGVPGVGVPGVGVPGAGVPGVGVPGVGVPGVGVPGVGVPGAGVPGVGVPGVGVPGVGVPGVGVPGAGVPGVGVPGVGVPGVGVPGVGVPGAGVPGVGVPGVGVP

SEQ ID NO: 55 - protein, 350 aa, synthetic construct; identical to SEQ ID NO: 40

SEQ ID NO: 56 - protein, 405 aa, synthetic construct
MSKGPGVGVPGVGVPGVGVPGVGVPGVGVPGVGVPGVGVPGVGVPGVGVPGVGVPGVGVPGVGVPGVGVPGVGVPGVGVPGVGVPGVGVPGVGVPGVGVPGVGVPGVGVPGVGVPGVGVPGVGVPGVGVPGVGVPGVGVPGVGVPGVGVPGVGVPGVGVPGVGVPGVGVPGVGVPGVGVPGVGVPGVGVPGVGVPGVGVPGVGVPGVGVPGVGVPGVGVPGVGVPGVGVPGVGVPGVGVPGVGVPGVGVPGVGVPGVGVPGVGVPGVGVPGVGVPGVGVPGVGVPGVGVPGVGVPGVGVPGVGVPGVGVPGVGVPGVGVPGVGVPGVGVPGVGVPGVGVPGVGVPGVGVPGVGVPGVGVPGVGVPGVGVPGVGVPGVGVPGVGVPGVGVPGVGVPGVGVPGVGVP

SEQ ID NO: 57 - protein, 400 aa, synthetic construct; identical to SEQ ID NO: 27

SEQ ID NO: 58 - protein, 406 aa, synthetic construct
MSKGPGVGVPGLGVPGVGVPGLGVPGVGVPGVGVPGLGVPGVGVPGLGVPGVGVPGVGVPGLGVPGVGVPGLGVPGVGVPGVGVPGLGVPGVGVPGLGVPGVGVPGVGVPGLGVPGVGVPGLGVPGVGVPGVGVPGLGVPGVGVPGLGVPGVGVPGVGVPGLGVPGVGVPGLGVPGVGVPGVGVPGLGVPGVGVPGLGVPGVGVPGVGVPGLGVPGVGVPGLGVPGVGVPGVGVPGLGVPGVGVPGLGVPGVGVPGVGVPGLGVPGVGVPGLGVPGVGVPGVGVPGLGVPGVGVPGLGVPGVGVPGVGVPGLGVPGVGVPGLGVPGVGVPGVGVPGLGVPGVGVPGLGVPGVGVPGVGVPGLGVPGVGVPGLGVPGVGVPGVGVPGLGVPGVGVPGLGVPGVGVPG

SEQ ID NO: 59 - protein, 402 aa, synthetic construct
PGVGVPGLGVPGVGVPGLGVPGVGVPGVGVPGLGVPGVGVPGLGVPGVGVPGVGVPGLGVPGVGVPGLGVPGVGVPGVGVPGLGVPGVGVPGLGVPGVGVPGVGVPGLGVPGVGVPGLGVPGVGVPGVGVPGLGVPGVGVPGLGVPGVGVPGVGVPGLGVPGVGVPGLGVPGVGVPGVGVPGLGVPGVGVPGLGVPGVGVPGVGVPGLGVPGVGVPGLGVPGVGVPGVGVPGLGVPGVGVPGLGVPGVGVPGVGVPGLGVPGVGVPGLGVPGVGVPGVGVPGLGVPGVGVPGLGVPGVGVPGVGVPGLGVPGVGVPGLGVPGVGVPGVGVPGLGVPGVGVPGLGVPGVGVPGVGVPGLGVPGVGVPGLGVPGVGVPGVGVPGLGVPGVGVPGLGVPGVGVPG

SEQ ID NO: 60 - protein, 400 aa, synthetic construct; identical to SEQ ID NO: 33

SEQ ID NO: 61 - protein, 494 aa, Homo sapiens
MSTTLLSAFYDVDFLCKTEKSLANLNLNNMLDKKAVGTPVAAAPSSGFAPGFLRRHSASNLHALAHPAPSPGSCSPKFPGAANGSSCGSAAAGGPTSYGTLKEPSGGGGTALLNKENKFRDRSFSENGDRSQHLLHLQQQQKGGGGSQINSTRYKTELCRPFEESGTCKYGEKCQFAHGFHELRSLTRHPKYKTELCRTFHTIGFCPYGPRCHFIHNADERRPAPSGGASGDLRAFGTRDALHLGFPREPRPKLHHSLSFSGFPSGHHQPPGGLESPLLLDSPTSRTPPPPSCSSASSCSSSASSCSSASAASTPSGAPTCCASAAAAAAAALLYGTGGAEDLLAPGAPCAACSSASCANNAFAFGPELSSLITPLAIQTHNFAAVAAAAYYRSQQQQQQQGLAPPAQPPAPPSATLPAGAAAPPSPPFSFQLPRRLSDSPVFDAPPSPPDSLSDRDSYLSGSLSSGSLSGSESPSLDPGRRLPIFSRLSISDD

SEQ ID NO: 62 - protein, 493 aa, Homo sapiens
STTLLSAFYDVDFLCKTEKSLANLNLNNMLDKKAVGTPVAAAPSSGFAPGFLRRHSASNLHALAHPAPSPGSCSPKFPGAANGSSCGSAAAGGPTSYGTLKEPSGGGGTALLNKENKFRDRSFSENGDRSQHLLHLQQQQKGGGGSQINSTRYKTELCRPFEESGTCKYGEKCQFAHGFHELRSLTRHPKYKTELCRTFHTIGFCPYGPRCHFIHNADERRPAPSGGASGDLRAFGTRDALHLGFPREPRPKLHHSLSFSGFPSGHHQPPGGLESPLLLDSPTSRTPPPPSCSSASSCSSSASSCSSASAASTPSGAPTCCASAAAAAAAALLYGTGGAEDLLAPGAPCAACSSASCANNAFAFGPELSSLITPLAIQTHNFAAVAAAAYYRSQQQQQQQGLAPPAQPPAPPSATLPAGAAAPPSPPFSFQLPRRLSDSPVFDAPPSPPDSLSDRDSYLSGSLSSGSLSGSESPSLDPGRRLPIFSRLSISDD

SEQ ID NO: 63 - protein, 71 aa, Homo sapiens
MSTRYKTELCRPFEESGTCKYGEKCQFAHGFHELRSLTRHPKYKTELCRTFHTIGFCPYGPRCHFIHNADE

SEQ ID NO: 64 - protein, 43 aa, Homo sapiens
MYGEKCQFAHGFHELRSLTRHPKYKTELCRTFHTIGFCPYGPR

SEQ ID NO: 65 - protein, 70 aa, Homo sapiens
STRYKTELCRPFEESGTCKYGEKCQFAHGFHELRSLTRHPKYKTELCRTFHTIGFCPYGPRCHFIHNADE

SEQ ID NO: 66 - protein, 42 aa, Homo sapiens
YGEKCQFAHGFHELRSLTRHPKYKTELCRTFHTIGFCPYGPR

SEQ ID NO: 67 - protein, 429 aa, Homo sapiens
MAQAPADPGREGHLEQRILQVLTEAGSPVKLAQLVKECQAPKRELNQVLYRMKKELKVSLTSPATWCLGGTDPEGEGPAELALSSPAERPQQHAATIPETPGPQFSQQREEDIYRFLKDNGPQRALVIAQALGMRTAKDVNRDLYRMKSRHLLDMDEQSKAWTIYRPEDSGRRAKSASIIYQHNPINMICQNGPNSWISIANSEAIQIGHGNIITRQTVSREDGSAGPRHLPSMAPGDSSTWGTLVDPWGPQDIHMEQSILRRVQLGHSNEMRLHGVPSEGPAHIPPGSPPVSATAAGPEASFEARIPSPGTHPEGEAAQRIHMKSCFLEDATIGNSNKMSISPGVAGPGGVAGSGEGEPGEDAGRRPADTQSRSHFPRDIGQPITPSHSKLTPKLETMTLGNRSHKAAEGSHYVDEASHEGSWWGGGI

SEQ ID NO: 68 - protein, 428 aa, Homo sapiens
AQAPADPGREGHLEQRILQVLTEAGSPVKLAQLVKECQAPKRELNQVLYRMKKELKVSLTSPATWCLGGTDPEGEGPAELALSSPAERPQQHAATIPETPGPQFSQQREEDIYRFLKDNGPQRALVIAQALGMRTAKDVNRDLYRMKSRHLLDMDEQSKAWTIYRPEDSGRRAKSASIIYQHNPINMICQNGPNSWISIANSEAIQIGHGNIITRQTVSREDGSAGPRHLPSMAPGDSSTWGTLVDPWGPQDIHMEQSILRRVQLGHSNEMRLHGVPSEGPAHIPPGSPPVSATAAGPEASFEARIPSPGTHPEGEAAQRIHMKSCFLEDATIGNSNKMSISPGVAGPGGVAGSGEGEPGEDAGRRPADTQSRSHFPRDIGQPITPSHSKLTPKLETMTLGNRSHKAAEGSHYVDEASHEGSWWGGGI

SEQ ID NO: 69 - protein, 64 aa, Homo sapiens
MPGREGHLEQRILQVLTEAGSPVKLAQLVKECQAPKRELNQVLYRMKKELKVSLTSPATWCLGG

SEQ ID NO: 70 - protein, 63 aa, Homo sapiens
PGREGHLEQRILQVLTEAGSPVKLAQLVKECQAPKRELNQVLYRMKKELKVSLTSPATWCLGG

SEQ ID NO: 71 - protein, 65 aa, Homo sapiens
MPQFSQQREEDIYRFLKDNGPQRALVIAQALGMRTAKDVNRDLYRMKSRHLLDMDEQSKAWTIYR

SEQ ID NO: 72 - protein, 64 aa, Homo sapiens
PQFSQQREEDIYRFLKDNGPQRALVIAQALGMRTAKDVNRDLYRMKSRHLLDMDEQSKAWTIYR

SEQ ID NO: 73 - protein, 69 aa, Homo sapiens
SPQFSQQREEDIYRFLKDNGPQRALVIAQALGMRTAKDVNRDLYRMKSRHLLDMDEQSKAWTIYRWTIY

SEQ ID NO: 74 - protein, 636 aa, Homo sapiens
MNPSAPSYPMASLYVGDLHPDVTEAMLYEKFSPAGPILSIRVCRDMITRRSLGYAYVNFQQPADAERALDTMNFDVIKGKPVRIMWSQRDPSLRKSGVGNIFIKNLDKSIDNKALYDTFSAFGNILSCKVVCDENGSKGYGFVHFETQEAAERAIEKMNGMLLNDRKVFVGRFKSRKEREAELGARAKEFTNVYIKNFGEDMDDERLKDLFGKFGPALSVKVMTDESGKSKGFGFVSFERHEDAQKAVDEMNGKELNGKQIYVGRAQKKVERQTELKRKFEQMKQDRITRYQGVNLYVKNLDDGIDDERLRKEFSPFGTITSAKVMMEGGRSKGFGFVCFSSPEEATKAVTEMNGRIVATKPLYVALAQRKEERQAHLTNQYMQRMASVRAVPNPVINPYQPAPPSGYFMAAIPQTQNRAAYYPPSQIAQLRPSPRWTAQGARPHPFQNMPGAIRPAAPRPPFSTMRPASSQVPRVMSTQRVANTSTQTMGPRPAAAAAAATPAVRTVPQYKYAAGVRNPQQHLNAQPQVTMQQPAVHVQGQEPLTASMLASAPPQEQKQMLGERLFPLIQAMHPTLAGKITGMLLEIDNSELLHMLESPESLRSKVDEAVAVLQAHQAKEAAQKAVNSATGVPTV

SEQ ID NO: 75 - protein, 635 aa, Homo sapiens
NPSAPSYPMASLYVGDLHPDVTEAMLYEKFSPAGPILSIRVCRDMITRRSLGYAYVNFQQPADAERALDTMNFDVIKGKPVRIMWSQRDPSLRKSGVGNIFIKNLDKSIDNKALYDTFSAFGNILSCKVVCDENGSKGYGFVHFETQEAAERAIEKMNGMLLNDRKVFVGRFKSRKEREAELGARAKEFTNVYIKNFGEDMDDERLKDLFGKFGPALSVKVMTDESGKSKGFGFVSFERHEDAQKAVDEMNGKELNGKQIYVGRAQKKVERQTELKRKFEQMKQDRITRYQGVNLYVKNLDDGIDDERLRKEFSPFGTITSAKVMMEGGRSKGFGFVCFSSPEEATKAVTEMNGRIVATKPLYVALAQRKEERQAHLTNQYMQRMASVRAVPNPVINPYQPAPPSGYFMAAIPQTQNRAAYYPPSQIAQLRPSPRWTAQGARPHPFQNMPGAIRPAAPRPPFSTMRPASSQVPRVMSTQRVANTSTQTMGPRPAAAAAAATPAVRTVPQYKYAAGVRNPQQHLNAQPQVTMQQPAVHVQGQEPLTASMLASAPPQEQKQMLGERLFPLIQAMHPTLAGKITGMLLEIDNSELLHMLESPESLRSKVDEAVAVLQAHQAKEAAQKAVNSATGVPTV

SEQ ID NO: 76 - protein, 174 aa, Homo sapiens
MSYPMASLYVGDLHPDVTEAMLYEKFSPAGPILSIRVCRDMITRRSLGYAYVNFQQPADAERALDTMNFDVIKGKPVRIMWSQRDPSLRKSGVGNIFIKNLDKSIDNKALYDTFSAFGNILSCKVVCDENGSKGYGFVHFETQEAAERAIEKMNGMLLNDRKVFVGRFKSRKER

SEQ ID NO: 77 - protein, 173 aa, Homo sapiens
SYPMASLYVGDLHPDVTEAMLYEKFSPAGPILSIRVCRDMITRRSLGYAYVNFQQPADAERALDTMNFDVIKGKPVRIMWSQRDPSLRKSGVGNIFIKNLDKSIDNKALYDTFSAFGNILSCKVVCDENGSKGYGFVHFETQEAAERAIEKMNGMLLNDRKVFVGRFKSRKER

SEQ ID NO: 78 - protein, 80 aa, Homo sapiens
MASLYVGDLHPDVTEAMLYEKFSPAGPILSIRVCRDMITRRSLGYAYVNFQQPADAERALDTMNFDVIKGKPVRIMWSQR

SEQ ID NO: 79 - protein, 79 aa, Homo sapiens
ASLYVGDLHPDVTEAMLYEKFSPAGPILSIRVCRDMITRRSLGYAYVNFQQPADAERALDTMNFDVIKGKPVRIMWSQR

SEQ ID NO: 80 - protein, 78 aa, Homo sapiens
MGNIFIKNLDKSIDNKALYDTFSAFGNILSCKVVCDENGSKGYGFVHFETQEAAERAIEKMNGMLLNDRKVFVGRFKS

SEQ ID NO: 81 - protein, 77 aa, Homo sapiens
GNIFIKNLDKSIDNKALYDTFSAFGNILSCKVVCDENGSKGYGFVHFETQEAAERAIEKMNGMLLNDRKVFVGRFKS

SEQ ID NO: 82 - protein, 79 aa, Homo sapiens
MTNVYIKNFGEDMDDERLKDLFGKFGPALSVKVMTDESGKSKGFGFVSFERHEDAQKAVDEMNGKELNGKQIYVGRAQK

SEQ ID NO: 83 - protein, 78 aa, Homo sapiens
TNVYIKNFGEDMDDERLKDLFGKFGPALSVKVMTDESGKSKGFGFVSFERHEDAQKAVDEMNGKELNGKQIYVGRAQK

SEQ ID NO: 84 - protein, 78 aa, Homo sapiens
MVNLYVKNLDDGIDDERLRKEFSPFGTITSAKVMMEGGRSKGFGFVCFSSPEEATKAVTEMNGRIVATKPLYVALAQR

SEQ ID NO: 85 - protein, 77 aa, Homo sapiens
VNLYVKNLDDGIDDERLRKEFSPFGTITSAKVMMEGGRSKGFGFVCFSSPEEATKAVTEMNGRIVATKPLYVALAQR

SEQ ID NO: 86 - protein, 182 aa, synthetic construct
KHPLQNRWALWFFKNDKSKTWQANLRLISKFDTVEDFWALYNHIQLSSNLMPGCDYSLFKDGIEPMWEDEKNKRGGRWLITLNKQQRRSDLDRFWLETLLCLIGESFDDYSDDVCGAVVNVRAKGDKIAIWTTECENREAVTHIGRVYKERLGLPPKIVIGYQSHADTATKSGSTTKNRFVV

SEQ ID NO: 87 - protein, 183 aa, synthetic construct
MKHPLQNRWALWFFKNDKSKTWQANLRLISKFDTVEDFWALYNHIQLSSNLMPGCDYSLFKDGIEPMWEDEKNKRGGRWLITLNKQQRRSDLDRFWLETLLCLIGESFDDYSDDVCGAVVNVRAKGDKIAIWTTECENREAVTHIGRVYKERLGLPPKIVIGYQSHADTATKSGSTTKNRFVV

SEQ ID NO: 88 - protein, 217 aa, Homo sapiens [sequence omitted]

SEQ ID NO: 89 - protein, 89 aa, synthetic construct
VRKIGELVRYLNTNPVGGLLEYARSHGFAAEFKLVDQSGPPHEPKFVYQAKVGGRWFPAVCAHSKKQGKQEAADAALRVLIGENEKAER

SEQ ID NO: 90 - protein, 66 aa, synthetic construct
LEGKVKWFNSEKGFGFIEVEGQDDVFVHFSAIQGEGFKTLEEGQAVSFEIVEGNRGPQAANVTKEA

SEQ ID NO: 91 - protein, 78 aa, synthetic construct
GKKVIATKVLGTVKWFNVRNGYGFINRNDTKEDVFVHQTAIKKNNPRKYLRSVGDGETVEFDVVEGEKGAEAANVTGP

SEQ ID NO: 92 - protein, 99 aa, synthetic construct
NTENKSQPKRLHVSNIPFRFRDPDLRQMFGQFGKILDVEIIFNERGSKGFGFVTFENSADADRAREKLHGTVVEGRKIEVNNATARVMTNKKTVNPYTN

SEQ ID NO: 93 - protein, 261 aa, synthetic construct
DSVYSGQQPSVGTEIFVGKIPRDLFEDELVPLFEKAGPIWDLRLMMDPLTGLNRGYAFVTFCTKEAAQEAVKLYNNHEIRSGKHIGVCISVANNRLFVGSIPKSKTKEQILEEFSKVTEGLTDVILYHQPDDKKKNRGFCFLEYEDHKTAAQARRRLMSGKVKVWGNVGTVEWADPIEDPDPEVMAKVKVLFVRNLANTVTEEILEKAFSQFGKLERVKKLKDYAFIHFDERDGAVKAMEEMNGKDLEGENIEIVFAKPPD

SEQ ID NO: 94 - protein, 152 aa, synthetic construct [sequence omitted]

SEQ ID NO: 95 - protein, 151 aa, synthetic construct
SELSVAQKPEKLLERCKYWPACKNGDECAYHHPISPCKAFPNCKFAEKCLFVHPNCKYDAKCTKPDCPFTHVSRRIPVLSPKPAVAPPAPPSSSQLCRYFPACKKMECPFYHPKHCRFNTQCTRPDCTFYHPTINVPPRHALKWIRPQTSE

SEQ ID NO: 96 - protein, 216 aa, Homo sapiens
ATVEPETTPTPNPPTTEEEKTESNQEVANPEHYIKHPLQNRWALWFFKNDKSKTWQANLRLISKFDTVEDFWALYNHIQLSSNLMPGCDYSLFKDGIEPMWEDEKNKRGGRWLITLNKQQRRSDLDRFWLETLLCLIGESFDDYSDDVCGAVVNVRAKGDKIAIWTTECENREAVTHIGRVYKERLGLPPKIVIGYQSHADTATKSGSTTKNRFVV

SEQ ID NO: 97 - protein, 184 aa, synthetic construct
GAIEDPELEAIKARVREMEEEAEKLKELQNEVEKQMNMSPPPGNAGPVIMSIEEKMEADARSIYVGNVDYGATAEELEAHFHGCGSVNRVTILCDKFSGHPKGFAYIEFSDKESVRTSLALDESLFRGRQIKVIPKRTNRPGISTTDRGFPRARYRARTTNYNSSRSRFYSGFNSRPRGRVYRG

SEQ ID NO: 98 - protein, 266 aa, synthetic construct
GNSVTYSTLISGLGKAGRLEEALELFEEMKEKGIVPTVVTYTTLINGLGKAGKLDEALELFEEMKEKGLVPNIVTYTSLINGLGKAGRVEEALELFDEMKERGVVPNVVTFSTLISGFARAGRLEEALELFEEMKEKGIVPSVVTYTTLIDGLCKAGKLDEALKLFEEMVEKGIKPNVVTYTTLIDGLGRAGKLDEALKLFEEMVEKGIKPNVVTYSTLIDGLCKAGKLDEALKLFEEMVEKGIKPTVELTYRRVVESYCRAKRFE

SEQ ID NO: 99 - protein, 349 aa, synthetic construct
GRSRLLEDFRNNRYPNLQLREIAGHIMEFSQDQHGSRFIQLKLERATPAERQLVFNEILQAAYQLMVDVFGVFVIQKFFEFGSLEQKLALAERIRGHVLSLALQMYGTRVIQKALEFIPSDQQNEMVRELDGHVLKCVKDQNGRGVVYKCIECVQPQSLQFIIDAFKGQVFALSTHPYGPHVIQRILEHCLPDQTLPILEELHQHTEQLVQDQYGVWVIHHVLEHGRPEDKSKIVAEIRGNVLVLSQHKFAMHVVQKCVTHASRTERAVLIDEVCTMNDGPHSALYTMMKDQYAQLVVRKMIDVAEPGQRKIVMHKIRPHIATLRKYTYGKHILAKLEKYYMKNGVDLG

SEQ ID NO: 100 - protein, 72 aa, synthetic construct
DKKSPISQVHEIGIKRNMTVHFKVLREEGPAHMKNFITACIVGSIVTEGEGNGKKVSKKRAAEKMLVELQKL

SEQ ID NO: 101 - protein, 86 aa, synthetic construct
YVCHFENCGKAFKKHNQLKVHQFSHTQQLPYECPHEGCDKRFSLPSRLKRHEKVHAGYPCKKDDSCSFVGKTWTLYLKHVAECHQD

SEQ ID NO: 102 - protein, 991 aa, Capsella rubella
MHRGNEDLSFGDDYEKEIGLLLGEQQRRQEEADEIEKELNLYRSGSAPPTVDGSVNAAGGLFNGGGRGPFMEFGGGNKGNGFGGDDDELRKDPAYLSYYYANMKLNPRLPPPLMSREDLRVAQRLKGSSNVLGGVGDRRNVNESRSLFSMPPGFDQMNEFEAEKTNASSSEWDANGLIGLPGLGLGGKQKSFADIFQPDMGHPVSQQPSRPASRNAFDENVDSTNNQSPSASQGIGAPPPYSYAAVLGSSLSRNGTPDPQAVARVPSPCLTPIGSGRVSSNDKRNTSNQSPFNGVTSGLNESSDLVNALSGMNLSGSGGLDDRGQAEQDVEKVRNYMFGFQGGHNEVSQHVFPNKSDQAQKATGSLRNLHMRGSQGSAYNGGGLANPYQHLDSPNYCLNNYALNPAVASVMANQLGNSNFSPMYDNYSAASALGFSGMDSRLHGGGFESRNLGRSNRMMGGGGLQSHMADPMYHQYGRYSENVDALDLLNDPAMDRSFMGNSYMNMLELQRAYLGAQKSQYGVPYKSGSPNSHSYYGSPTFGSNMSYPGSPLAHHAMQNSLMSPCSPMRRGEVNMRYPSATRNYSGGVMGSWHMDASLDEGFGSSLLEEFKSNKTRGFELSEIAGHVVEFSADQYGSRFIQQKLETATTDEKNMVYEEIMPHALALMTDVFGNYVIQKFFEHGLPPQRRELGDKLFENVLPLSLQMYGCRVIQKAIEVVDLDQKIKMVKELDGHVMRCVRDQNGNHVVQKCIECVPEENIEFIISTFFGHVVSLSTHPYGCRVIQRVLEHCHDPDTQSKVMEEILSTVSMLAQDQYGNYVVQHVLEHGKPDERTVIIKELAGKIVQMSQQKFASNVVEKCLTFGGPEERELLVNEMLGTTDENEPLQAMMKDQFANYVVQKVLETCDDQQRELILTRIKVHLNALKKYTYGKHVVARIEKLVAAGGMHMFLLFPLGLKEENGFAVPNPASDVVRPQVLYSLTRVDGSAIAF

SEQ ID NO: 103 - protein, 990 aa, Capsella rubella
HRGNEDLSFGDDYEKEIGLLLGEQQRRQEEADEIEKELNLYRSGSAPPTVDGSVNAAGGLFNGGGRGPFMEFGGGNKGNGFGGDDDELRKDPAYLSYYYANMKLNPRLPPPLMSREDLRVAQRLKGSSNVLGGVGDRRNVNESRSLFSMPPGFDQMNEFEAEKTNASSSEWDANGLIGLPGLGLGGKQKSFADIFQPDMGHPVSQQPSRPASRNAFDENVDSTNNQSPSASQGIGAPPPYSYAAVLGSSLSRNGTPDPQAVARVPSPCLTPIGSGRVSSNDKRNTSNQSPFNGVTSGLNESSDLVNALSGMNLSGSGGLDDRGQAEQDVEKVRNYMFGFQGGHNEVSQHVFPNKSDQAQKATGSLRNLHMRGSQGSAYNGGGLANPYQHLDSPNYCLNNYALNPAVASVMANQLGNSNFSPMYDNYSAASALGFSGMDSRLHGGGFESRNLGRSNRMMGGGGLQSHMADPMYHQYGRYSENVDALDLLNDPAMDRSFMGNSYMNMLELQRAYLGAQKSQYGVPYKSGSPNSHSYYGSPTFGSNMSYPGSPLAHHAMQNSLMSPCSPMRRGEVNMRYPSATRNYSGGVMGSWHMDASLDEGFGSSLLEEFKSNKTRGFELSEIAGHVVEFSADQYGSRFIQQKLETATTDEKNMVYEEIMPHALALMTDVFGNYVIQKFFEHGLPPQRRELGDKLFENVLPLSLQMYGCRVIQKAIEVVDLDQKIKMVKELDGHVMRCVRDQNGNHVVQKCIECVPEENIEFIISTFFGHVVSLSTHPYGCRVIQRVLEHCHDPDTQSKVMEEILSTVSMLAQDQYGNYVVQHVLEHGKPDERTVIIKELAGKIVQMSQQKFASNVVEKCLTFGGPEERELLVNEMLGTTDENEPLQAMMKDQFANYVVQKVLETCDDQQRELILTRIKVHLNALKKYTYGKHVVARIEKLVAAGGMHMFLLFPLGLKEENGFAVPNPASDVVRPQVLYSLTRVDGSAIAF

SEQ ID NO: 104 - DNA, 6780 bp, synthetic construct
  source 1..6780: mol_type = other DNA
tggcgaatgggacgcgccctgtagcggcgcattaagcgcggcgggtgtggtggttacgcgcagcgtgaccgctacacttgccagcgccctagcgcccgctcctttcgctttcttcccttcctttctcgccacgttcgccggctttccccgtcaagctctaaatcgggggctccctttagggttccgatttagtgctttacggcacctcgaccccaaaaaacttgattagggtgatggttcacgtagtgggccatcgccctgatagacggtttttcgccctttgacgttggagtccacgttctttaatagtggactcttgttccaaactggaacaacactcaaccctatctcggtctattcttttgatttataagggattttgccgatttcggcctattggttaaaaaatgagctgatttaacaaaaatttaacgcgaattttaacaaaatattaacgtttacaatttcaggtggcacttttcggggaaatgtgcgcggaacccctatttgtttatttttctaaatacattcaaatatgtatccgctcatgaattaattcttagaaaaactcatcgagcatcaaatgaaactgcaatttattcatatcaggattatcaataccatatttttgaaaaagccgtttctgtaatgaaggagaaaactcaccgaggcagttccataggatggcaagatcctggtatcggtctgcgattccgactcgtccaacatcaatacaacctattaatttcccctcgtcaaaaataaggttatcaagtgagaaatcaccatgagtgacgactgaatccggtgagaatggcaaaagtttatgcatttctttccagacttgttcaacaggccagccattacgctcgtcatcaaaatcactcgcatcaaccaaaccgttattcattcgtgattgcgcctgagcgagacgaaatacgcgatcgctgttaaaaggacaattacaaacaggaatcgaatgcaaccggcgcaggaacactgccagcgcatcaacaatattttcacctgaatcaggatattcttctaatacctggaatgctgttttcccggggatcgcagtggtgagtaaccatgcatcatcaggagtacggataaaatgcttgatggtcggaagaggcataaattccgtcagccagtttagtctgaccatctcatctgtaacatcattggcaacgctacctttgccatgtttcagaaacaactctggcgcatcgggcttcccatacaatcgatagattgtcgcacctgattgcccgacattatcgcgagcccatttatacccatataaatcagcatccatgttggaatttaatcgcggcctagagcaagacgtttcccgttgaatatggctcataacaccccttgtattactgtttatgtaagcagacagttttattgttcatgaccaaaatcccttaacgtgagttttcgttccactgagcgtcagaccccgtagaaaagatcaaaggatcttcttgagatcctttttttctgcgcgtaatctgctgcttgcaaacaaaaaaaccaccgctaccagcggtggtttgtttgccggatcaagagctaccaactctttttccgaaggtaactggcttcagcagagcgcagataccaaatactgtccttctagtgtagccgtagttaggccaccacttcaagaactctgtagcaccgcctacatacctcgctctgctaatcctgttaccagtggctgctgccagtggcgataagtcgtgtcttaccgggttggactcaagacgatagttaccggataaggcgcagcggtcgggctgaacggggggttcgtgcacacagcccagcttggagcgaacgacctacaccgaactgagatacctacagcgtgagctatgagaaagcgccacgcttcccgaagggagaaaggcggacaggtatccggtaagcggcagggtcggaacaggagagcgcacgagggagcttccagggggaaacgcctggtatctttatagtcctgtcgggtttcgccacctctgacttgagcgtcgatttttgtgatgctcgtcaggggggcggagcctatggaaaaacgccagcaacgcggcctttttacggttcctggccttttgctggccttttgctcacatgttctttcctgcgttatcccctgattctgtggataaccgtattaccgcctttgagtgagctgataccgctcgccgcagccgaacgaccgagcgcagcgagtcagtgagcgaggaagcggaagagcgcctgatgcggtattttctccttacgcatctgtgcggtatttcacaccgcatatatggtgcactctcagtacaatctgctctgatgccgcatagttaagccagtatacactccgctatcgctacgtgactgggtcatggctgcgccccgacacccgccaacacccgctgacgcgccctgacgggcttgtctgctcccggcatccgcttacagacaagctgtgaccgtctccgggagctgcatgtgtcagaggttttcaccgtcatcaccgaaacgcgcgaggcagctgcggtaaagctcatcagcgtggtcgtgaagcgattcacagatgtctgcctgttcatccgcgtccagctcgttgagtttctccagaagcgttaatgtctggcttctgataaagcgggccatgttaagggcggttttttcctgtttggtcactgatgcctccgtgtaagggggatttctgttcatgggggtaatgataccgatgaaacgagagaggatgctcacgatacgggttactgatgatgaacatgcccggttactggaacgttgtgagggtaaacaactggcggtatggatgcggcgggaccagagaaaaatcactcagggtcaatgccagcgcttcgttaatacagatgtaggtgttccacagggtagccagcagcatcctgcgatgcagatccggaacataatggtgcagggcgctgacttccgcgtttccagactttacgaaacacggaaaccgaagaccattcatgttgttgctcaggtcgcagacgttttgcagcagcagtcgcttcacgttcgctcgcgtatcggtgattcattctgctaaccagtaaggcaaccccgccagcctagccgggtcctcaacgacaggagcacgatcatgcgcacccgtggggccgccatgccggcgataatggcctgcttctcgccgaaacgtttggtggcgggaccagtgacgaaggcttgagcgagggcgtgcaagattccgaataccgcaagcgacaggccgatcatcgtcgcgctccagcgaaagcggtcctcgccgaaaatgacccagagcgctgccggcacctgtcctacgagttgcatgataaagaagacagtcataagtgcggcgacgatagtcatgccccgcgcccaccggaaggagctgactgggttgaaggctctcaagggcatcggtcgagatcccggtgcctaatgagtgagctaacttacattaattgcgttgcgctcactgcccgctttccagtcgggaaacctgtcgtgccagctgcattaatgaatcggccaacgcgcggggagaggcggtttgcgtattgggcgccagggtggtttttcttttcaccagtgagacgggcaacagctgattgcccttcaccgcctggccctgagagagttgcagcaagcggtccacgctggtttgccccagcaggcgaaaatcctgtttgatggtggttaacggcgggatataacatgagctgtcttcggtatcgtcgtatcccactaccgagatatccgcaccaacgcgcagcccggactcggtaatggcgcgcattgcgcccagcgccatctgatcgttggcaaccagcatcgcagtgggaacgatgccctcattcagcatttgcatggtttgttgaaaaccggacatggcactccagtcgccttcccgttccgctatcggctgaatttgattgcgagtgagatatttatgccagccagccagacgcagacgcgccgagacagaacttaatgggcccgctaacagcgcgatttgctggtgacccaatgcgaccagatgctccacgcccagtcgcgtaccgtcttcatgggagaaaataatactgttgatgggtgtctggtcagagacatcaagaaataacgccggaacattagtgcaggcagcttccacagcaatggcatcctggtcatccagcggatagttaatgatcagcccactgacgcgttgcgcgagaagattgtgcaccgccgctttacaggcttcgacgccgcttcgttctaccatcgacaccaccacgctggcacccagttgatcggcgcgagatttaatcgccgcgacaatttgcgacggcgcgtgcagggccagactggaggtggcaacgccaatcagcaacgactgtttgcccgccagttgttgtgccacgcggttgggaatgtaattcagctccgccatcgccgcttccactttttcccgcgttttcgcagaaacgtggctggcctggttcaccacgcgggaaacggtctgataagagacaccggcatactctgcgacatcgtataacgttactggtttcacattcaccaccctgaattgactctcttccgggcgctatcatgccataccgcgaaaggttttgcgccattcgatggtgtccgggatctcgacgctctcccttatgcgactcctgcattaggaagcagcccagtagtaggttgaggccgttgagcaccgccgccgcaaggaatggtgcatgcaaggagatggcgcccaacagtcccccggccacggggcctgccaccatacccacgccgaaacaagcgctcatgagcccgaagtggcgagcccgatcttccccatcggtgatgtcggcgatataggcgccagcaaccgcacctgtggcgccggtgatgccggccacgatgcgtccggcgtagaggatcgagatctcgatcccgcgaaattaatacgactcactataggggaattgtgagcggataacaattcccctctagaaataattttgtttaactttaagaaggaggagtacatatgagcaaagggccgggcgtgggtgttccgggcgtaggtgtcccaggtgtgggcgtaccgggcgttggtgttcctggtgtcggcgtgccgggcgtgggtgttccgggcgtaggtgtcccaggtgtgggcgtaccgggcgttggtgttcctggtgtcggcgtgccgggcgtgggtgttccgggcgtaggtgtcccaggtgtgggcgtaccgggcgttggtgttcctggtgtcggcgtgccgggcgtgggtgttccgggcgtaggtgtcccaggtgtgggcgtaccgggcgttggtgttcctggtgtcggcgtgccgggcgtgggtgttccgggcgtaggtgtcccaggtgtgggcgtaccgggcgttggtgttcctggtgtcggcgtgccgggcgtgggtgttccgggcgtaggtgtcccaggtgtgggcgtaccgggcgttggtgttcctggtgtcggcgtgccgggcgtgggtgttccgggcgtaggtgtcccaggtgtgggcgtaccgggcgttggtgttcctggtgtcggcgtgccgggcgtgggtgttccgggcgtaggtgtcccaggtgtgggcgtaccgggcgttggtgttcctggtgtcggcgtgccgggcgtgggtgttccgggcgtaggtgtcccaggtgtgggcgtaccgggcgttggtgttcctggtgtcggcgtgccgggcgtgggtgttccgggcgtaggtgtcccaggtgtgggcgtaccgggcgttggtgttcctggtgtcggcgtgccgggcgtgggtgttccgggcgtaggtgtcccaggtgtgggcgtaccgggcgttggtgttcctggtgtcggcgtgccgggcgtgggtgttccgggcgtaggtgtcccaggtgtgggcgtaccgggcgttggtgttcctggtgtcggcgtgccgggcgtgggtgttccgggcgtaggtgtcccaggtgtgggcgtaccgggcgttggtgttcctggtgtcggcgtgccgggcgtgggtgttccgggcgtaggtgtcccaggtgtgggcgtaccgggcgttggtgttcctggtgtcggcgtgccgggcgtgggtgttccgggcgtaggtgtcccaggtgtgggcgtaccgggcgttggtgttcctggtgtcggcgtgccgggcgtgggtgttccgggcgtaggtgtcccaggtgtgggcgtaccgggcgttggtgttcctggtgtcggcgtgccgggcgtgcgtaaaatcggagagctggttcgctaccttaataccaaccctgttggagggctgttggaatatgcgcgtagccacggcttcgctgctgagttcaaattggtggatcaaagtgggccgccccacgagccgaagtttgtctatcaagctaaggtggggggacgctggttcccggctgtctgtgcacactcgaaaaaacaaggtaaacaggaggcggcggacgcagctttacgtgttcttattggggagaatgagaaggcggagcgcggctactgataatgatcttcaggatccgaattcgagctccgtcgacaagcttgcggccgcactcgagcaccaccaccaccaccactgagatccggctgctaacaaagcccgaaaggaagctgagttggctgctgccaccgctgagcaataactagcataaccccttggggcctctaaacgggtcttgaggggttttttgctgaaaggaggaactatatccggat

SEQ ID NO: 105 - DNA, 6696 bp, synthetic construct
  source 1..6696: mol_type = other DNA
tggcgaatgggacgcgccctgtagcggcgcattaagcgcggcgggtgtggtggttacgcgcagcgtgaccgctacacttgccagcgccctagcgcccgctcctttcgctttcttcccttcctttctcgccacgttcgccggctttccccgtcaagctctaaatcgggggctccctttagggttccgatttagtgctttacggcacctcgaccccaaaaaacttgattagggtgatggttcacgtagtgggccatcgccctgatagacggtttttcgccctttgacgttggagtccacgttctttaatagtggactcttgttccaaactggaacaacactcaaccctatctcggtctattcttttgatttataagggattttgccgatttcggcctattggttaaaaaatgagctgatttaacaaaaatttaacgcgaattttaacaaaatattaacgtttacaatttcaggtggcacttttcggggaaatgtgcgcggaacccctatttgtttatttttctaaatacattcaaatatgtatccgctcatgaattaattcttagaaaaactcatcgagcatcaaatgaaactgcaatttattcatatcaggattatcaataccatatttttgaaaaagccgtttctgtaatgaaggagaaaactcaccgaggcagttccataggatggcaagatcctggtatcggtctgcgattccgactcgtccaacatcaatacaacctattaatttcccctcgtcaaaaataaggttatcaagtgagaaatcaccatgagtgacgactgaatccggtgagaatggcaaaagtttatgcatttctttccagacttgttcaacaggccagccattacgctcgtcatcaaaatcactcgcatcaaccaaaccgttattcattcgtgattgcgcctgagcgagacgaaatacgcgatcgctgttaaaaggacaattacaaacaggaatcgaatgcaaccggcgcaggaacactgccagcgcatcaacaatattttcacctgaatcaggatattcttctaatacctggaatgctgttttcccggggatcgcagtggtgagtaaccatgcatcatcaggagtacggataaaatgcttgatggtcggaagaggcataaattccgtcagccagtttagtctgaccatctcatctgtaacatcattggcaacgctacctttgccatgtttcagaaacaactctggcgcatcgggcttcccatacaatcgatagattgtcgcacctgattgcccgacattatcgcgagcccatttatacccatataaatcagcatccatgttggaatttaatcgcggcctagagcaagacgtttcccgttgaatatggctcataacaccccttgtattactgtttatgtaagcagacagttttattgttcatgaccaaaatcccttaacgtgagttttcgttccactgagcgtcagaccccgtagaaaagatcaaaggatcttcttgagatcctttttttctgcgcgtaatctgctgcttgcaaacaaaaaaaccaccgctaccagcggtggtttgtttgccggatcaagagctaccaactctttttccgaaggtaactggcttcagcagagcgcagataccaaatactgtccttctagtgtagccgtagttaggccaccacttcaagaactctgtagcaccgcctacatacctcgctctgctaatcctgttaccagtggctgctgccagtggcgataagtcgtgtcttaccgggttggactcaagacgatagttaccggataaggcgcagcggtcgggctgaacggggggttcgtgcacacagcccagcttggagcgaacgacctacaccgaactgagatacctacagcgtgagctatgagaaagcgccacgcttcccgaagggagaaaggcggacaggtatccggtaagcggcagggtcggaacaggagagcgcacgagggagcttccagggggaaacgcctggtatctttatagtcctgtcgggtttcgccacctctgacttgagcgtcgatttttgtgatgctcgtcaggggggcggagcctatggaaaaacgccagcaacgcggcctttttacggttcctggccttttgctggccttttgctcacatgttctttcctgcgttatcccctgattctgtggataaccgtattaccgcctttgagtgagctgataccgctcgccgcagccgaacgaccgagcgcagcgagtcagtgagcgaggaagcggaagagcgcctgatgcggtattttctccttacgcatctgtgcggtatttcacaccgcatatatggtgcactctcagtacaatctgctctgatgccgcatagttaagccagtatacactccgctatcgctacgtgactgggtcatggctgcgccccgacacccgccaacacccgctgacgcgccctgacgggcttgtctgctcccggcatccgcttacagacaagctgtgaccgtctccgggagctgcatgtgtcagaggttttcaccgtcatcaccgaaacgcgcgaggcagctgcggtaaagctcatcagcgtggtcgtgaagcgattcacagatgtctgcctgttcatccgcgtccagctcgttgagtttctccagaagcgttaatgtctggcttctgataaagcgggccatgttaagggcggttttttcctgtttggtcactgatgcctccgtgtaagggggatttctgttcatgggggtaatgataccgatgaaacgagagaggatgctcacgatacgggttactgatgatgaacatgcccggttactggaacgttgtgagggtaaacaactggcggtatggatgcggcgggaccagagaaaaatcactcagggtcaatgccagcgcttcgttaatacagatgtaggtgttccacagggtagccagcagcatcctgcgatgcagatccggaacataatggtgcagggcgctgacttccgcgtttccagactttacgaaacacggaaaccgaagaccattcatgttgttgctcaggtcgcagacgttttgcagcagcagtcgcttcacgttcgctcgcgtatcggtgattcattctgctaaccagtaaggcaaccccgccagcctagccgggtcctcaacgacaggagcacgatcatgcgcacccgtggggccgccatgccggcgataatggcctgcttctcgccgaaacgtttggtggcgggaccagtgacgaaggcttgagcgagggcgtgcaagattccgaataccgcaagcgacaggccgatcatcgtcgcgctccagcgaaagcggtcctcgccgaaaatgacccagagcgctgccggcacctgtcctacgagttgcatgataaagaagacagtcataagtgcggcgacgatagtcatgccccgcgcccaccggaaggagctgactgggttgaaggctctcaagggcatcggtcgagatcccggtgcctaatgagtgagctaacttacattaattgcgttgcgctcactgcccgctttccagtcgggaaacctgtcgtgccagctgcattaatgaatcggccaacgcgcggggagaggcggtttgcgtattgggcgccagggtggtttttcttttcaccagtgagacgggcaacagctgattgcccttcaccgcctggccctgagagagttgcagcaagcggtccacgctggtttgccccagcaggcgaaaatcctgtttgatggtggttaacggcgggatataacatgagctgtcttcggtatcgtcgtatcccactaccgagatatccgcaccaacgcgcagcccggactcggtaatggcgcgcattgcgcccagcgccatctgatcgttggcaaccagcatcgcagtgggaacgatgccctcattcagcatttgcatggtttgttgaaaaccggacatggcactccagtcgccttcccgttccgctatcggctgaatttgattgcgagtgagatatttatgccagccagccagacgcagacgcgccgagacagaacttaatgggcccgctaacagcgcgatttgctggtgacccaatgcgaccagatgctccacgcccagtcgcgtaccgtcttcatgggagaaaataatactgttgatgggtgtctggtcagagacatcaagaaataacgccggaacattagtgcaggcagcttccacagcaatggcatcctggtcatccagcggatagttaatgatcagcccactgacgcgttgcgcgagaagattgtgcaccgccgctttacaggcttcgacgccgcttcgttctaccatcgacaccaccacgctggcacccagttgatcggcgcgagatttaatcgccgcgacaatttgcgacggcgcgtgcagggccagactggaggtggcaacgccaatcagcaacgactgtttgcccgccagttgttgtgccacgcggttgggaatgtaattcagctccgccatcgccgcttccactttttcccgcgttttcgcagaaacgtggctggcctggttcaccacgcgggaaacggtctgataagagacaccggcatactctgcgacatcgtataacgttactggtttcacattcaccaccctgaattgactctcttccgggcgctatcatgccataccgcgaaaggttttgcgccattcgatggtgtccgggatctcgacgctctcccttatgcgactcctgcattaggaagcagcccagtagtaggttgaggccgttgagcaccgccgccgcaaggaatggtgcatgcaaggagatggcgcccaacagtcccccggccacggggcctgccaccatacccacgccgaaacaagcgctcatgagcccgaagtggcgagcccgatcttccccatcggtgatgtcggcgatataggcgccagcaaccgcacctgtggcgccggtgatgccggccacgatgcgtccggcgtagaggatcgagatctcgatcccgcgaaattaatacgactcactataggggaattgtgagcggataacaattcccctctagaaataattttgtttaactttaagaaggaggagtacatatgggcgtgggtgttccgggcgtaggtgtcccaggtgtgggcgtaccgggcgttggtgttcctggtgtcggcgtgccgggcgtgggtgttccgggcgtaggtgtcccaggtgtgggcgtaccgggcgttggtgttcctggtgtcggcgtgccgggcgtgggtgttccgggcgtaggtgtcccaggtgtgggcgtaccgggcgttggtgttcctggtgtcggcgtgccgggcgtgggtgttccgggcgtaggtgtcccaggtgtgggcgtaccgggcgttggtgttcctggtgtcggcgtgccgggcgtgggtgttccgggcgtaggtgtcccaggtgtgggcgtaccgggcgttggtgttcctggtgtcggcgtgccgggcgtgggtgttccgggcgtaggtgtcccaggtgtgggcgtaccgggcgttggtgttcctggtgtcggcgtgccgggcgtgggtgttccgggcgtaggtgtcccaggtgtgggcgtaccgggcgttggtgttcctggtgtcggcgtgccgggcgtgggtgttccgggcgtaggtgtcccaggtgtgggcgtaccgggcgttggtgttcctggtgtcggcgtgccgggcgtgggtgttccgggcgtaggtgtcccaggtgtgggcgtaccgggcgttggtgttcctggtgtcggcgtgccgggcgtgggtgttccgggcgtaggtgtcccaggtgtgggcgtaccgggcgttggtgttcctggtgtcggcgtgccgggcgtgggtgttccgggcgtaggtgtcccaggtgtgggcgtaccgggcgttggtgttcctggtgtcggcgtgccgggcgtgggtgttccgggcgtaggtgtcccaggtgtgggcgtaccgggcgttggtgttcctggtgtcggcgtgccgggcgtgggtgttccgggcgtaggtgtcccaggtgtgggcgtaccgggcgttggtgttcctggtgtcggcgtgccgggcgtgggtgttccgggcgtaggtgtcccaggtgtgggcgtaccgggcgttggtgttcctggtgtcggcgtgccgggcgtgggtgttccgggcgtaggtgtcccaggtgtgggcgtaccgggcgttggtgttcctggtgtcggcgtgccgggcgtgggtgttccgggcgtaggtgtcccaggtgtgggcgtaccgggcgttggtgttcctggtgtcggcgtgccgctagaaggaaaagtaaagtggtttaattcagagaagggtttcggcttcatcgaagtcgagggtcaagatgacgtgtttgttcactttagcgcgattcagggtgaaggcttcaaaacgctggaagagggccaagctgtgtcctttgagatcgtggagggcaaccgtggtccgcaggcggcaaatgttaccaaagaagccggctactgataatgatcttcaggatccgaattcgagctccgtcgacaagcttgcggccgcactcgagcaccaccaccaccaccactgagatccggctgctaacaaagcccgaaaggaagctgagttggctgctgccaccgctgagcaataactagcataaccccttggggcctctaaacgggtcttgaggggttttttgctgaaaggaggaactatatccggat

SEQ ID NO: 106 - DNA, 6744 bp, synthetic construct
  source 1..6744: mol_type = other DNA
tggcgaatgggacgcgccctgtagcggcgcattaagcgcggcgggtgtggtggttacgcgcagcgtgaccgctacacttgccagcgccctagcgcccgctcctttcgctttcttcccttcctttctcgccacgttcgccggctttccccgtcaagctctaaatcgggggctccctttagggttccgatttagtgctttacggcacctcgaccccaaaaaacttgattagggtgatggttcacgtagtgggccatcgccctgatagacggtttttcgccctttgacgttggagtccacgttctttaatagtggactcttgttccaaactggaacaacactcaaccctatctcggtctattcttttgatttataagggattttgccgatttcggcctattggttaaaaaatgagctgatttaacaaaaatttaacgcgaattttaacaaaatattaacgtttacaatttcaggtggcacttttcggggaaatgtgcgcggaacccctatttgtttatttttctaaatacattcaaatatgtatccgctcatgaattaattcttagaaaaactcatcgagcatcaaatgaaactgcaatttattcatatcaggattatcaataccatatttttgaaaaagccgtttctgtaatgaaggagaaaactcaccgaggcagttccataggatggcaagatcctggtatcggtctgcgattccgactcgtccaacatcaatacaacctattaatttcccctcgtcaaaaataaggttatcaagtgagaaatcaccatgagtgacgactgaatccggtgagaatggcaaaagtttatgcatttctttccagacttgttcaacaggccagccattacgctcgtcatcaaaatcactcgcatcaaccaaaccgttattcattcgtgattgcgcctgagcgagacgaaatacgcgatcgctgttaaaaggacaattacaaacaggaatcgaatgcaaccggcgcaggaacactgccagcgcatcaacaatattttcacctgaatcaggatattcttctaatacctggaatgctgttttcccggggatcgcagtggtgagtaaccatgcatcatcaggagtacggataaaatgcttgatggtcggaagaggcataaattccgtcagccagtttagtctgaccatctcatctgtaacatcattggcaacgctacctttgccatgtttcagaaacaactctggcgcatcgggcttcccatacaatcgatagattgtcgcacctgattgcccgacattatcgcgagcccatttatacccatataaatcagcatccatgttggaatttaatcgcggcctagagcaagacgtttcccgttgaatatggctcataacaccccttgtattactgtttatgtaagcagacagttttattgttcatgaccaaaatcccttaacgtgagttttcgttccactgagcgtcagaccccgtagaaaagatcaaaggatcttcttgagatcctttttttctgcgcgtaatctgctgcttgcaaacaaaaaaaccaccgctaccagcggtggtttgtttgccggatcaagagctaccaactctttttccgaaggtaactggcttcagcagagcgcagataccaaatactgtccttctagtgtagccgtagttaggccaccacttcaagaactctgtagcaccgcctacatacctcgctctgctaatcctgttaccagtggctgctgccagtggcgataagtcgtgtcttaccgggttggactcaagacgatagttaccggataaggcgcagcggtcgggctgaacggggggttcgtgcacacagcccagcttggagcgaacgacctacaccgaactgagatacctacagcgtgagctatgagaaagcgccacgcttcccgaagggagaaaggcggacaggtatccggtaagcggcagggtcggaacaggagagcgcacgagggagcttccagggggaaacgcctggtatctttatagtcctgtcgggtttcgccacctctgacttgagcgtcgatttttgtgatgctcgtcaggggggcggagcctatggaaaaacgccagcaacgcggcctttttacggttcctggccttttgctggccttttgctcacatgttctttcctgcgttatcccctgattctgtggataaccgtattaccgcctttgagtgagctgataccgctcgccgcagccgaacgaccgagcgcagcgagtcagtgagcgaggaagcggaagagcgcctgatgcggtattttctccttacgcatctgtgcggtatttcacaccgcatatatggtgcactctcagtacaatctgctctgatgccgcatagttaagccagtatacactccgctatcgctacgtgactgggtcatggctgcgccccgacacccgccaacacccgctgacgcgccctgacgggcttgtctgctcccggcatccgcttacagacaagctgtgaccgtctccgggagctgcatgtgtcagaggttttcaccgtcatcaccgaaacgcgcgaggcagctgcggtaaagctcatcagcgtggtcgtgaagcgattcacagatgtctgcctgttcatccgcgtccagctcgttgagtttctccagaagcgttaatgtctggcttctgataaagcgggccatgttaagggcggttttttcctgtttggtcactgatgcctccgtgtaagggggatttctgttcatgggggtaatgataccgatgaaacgagagaggatgctcacgatacgggttactgatgatgaacatgcccggttactggaacgttgtgagggtaaacaactggcggtatggatgcggcgggaccagagaaaaatcactcagggtcaatgccagcgcttcgttaatacagatgtaggtgttccacagggtagccagcagcatcctgcgatgcagatccggaacataatggtgcagggcgctgacttccgcgtttccagactttacgaaacacggaaaccgaagaccattcatgttgttgctcaggtcgcagacgttttgcagcagcagtcgcttcacgttcgctcgcgtatcggtgattcattctgctaaccagtaaggcaaccccgccagcctagccgggtcctcaacgacaggagcacgatcatgcgcacccgtggggccgccatgccggcgataatggcctgcttctcgccgaaacgtttggtggcgggaccagtgacgaaggcttgagcgagggcgtgcaagattccgaataccgcaagcgacaggccgatcatcgtcgcgctccagcgaaagcggtcctcgccgaaaatgacccagagcgctgccggcacctgtcctacgagttgcatgataaagaagacagtcataagtgcggcgacgatagtcatgccccgcgcccaccggaaggagctgactgggttgaaggctctcaagggcatcggtcgagatcccggtgcctaatgagtgagctaacttacattaattgcgttgcgctcactgcccgctttccagtcgggaaacctgtcgtgccagctgcattaatgaatcggccaacgcgcggggagaggcggtttgcgtattgggcgccagggtggtttttcttttcaccagtgagacgggcaacagctgattgcccttcaccgcctggccctgagagagttgcagcaagcggtccacgctggtttgccccagcaggcgaaaatcctgtttgatggtggttaacggcgggatataacatgagctgtcttcggtatcgtcgtatcccactaccgagatatccgcaccaacgcgcagcccggactcggtaatggcgcgcattgcgcccagcgccatctgatcgttggcaaccagcatcgcagtgggaacgatgccctcattcagcatttgcatggtttgttgaaaaccggacatggcactccagtcgccttcccgttccgctatcggctgaatttgattgcgagtgagatatttatgccagccagccagacgcagacgcgccgagacagaacttaatgggcccgctaacagcgcgatttgctggtgacccaatgcgaccagatgctccacgcccagtcgcgtaccgtcttcatgggagaaaataatactgttgatgggtgtctggtcagagacatcaagaaataacgccggaacattagtgcaggcagcttccacagcaatggcatcctggtcatccagcggatagttaatgatcagcccactgacgcgttgcgcgagaagattgtgcaccgccgctttacaggcttcgacgccgcttcgttctaccatcgacaccaccacgctggcacccagttgatcggcgcgagatttaatcgccgcgacaatttgcgacggcgcgtgcagggccagactggaggtggcaacgccaatcagcaacgactgtttgcccgccagttgttgtgccacgcggttgggaatgtaattcagctccgccatcgccgcttccactttttcccgcgttttcgcagaaacgtggctggcctggttcaccacgcgggaaacggtctgataagagacaccggcatactctgcgacatcgtataacgttactggtttcacattcaccaccctgaattgactctcttccgggcgctatcatgccataccgcgaaaggttttgcgccattcgatggtgtccgggatctcgacgctctcccttatgcgactcctgcattaggaagcagcccagtagtaggttgaggccgttgagcaccgccgccgcaaggaatggtgcatgcaaggagatggcgcccaacagtcccccggccacggggcctgccaccatacccacgccgaaacaagcgctcatgagcccgaagtggcgagcccgatcttccccatcggtgatgtcggcgatataggcgccagcaaccgcacctgtggcgccggtgatgccggccacgatgcgtccggcgtagaggatcgagatctcgatcccgcgaaattaatacgactcactataggggaattgtgagcggataacaattcccctctagaaataattttgtttaactttaagaaggaggagtacatatgagcaaagggccgggcgtgggtgttccgggcgtaggtgtcccaggtgtgggcgtaccgggcgttggtgttcctggtgtcggcgtgccgggcgtgggtgttccgggcgtaggtgtcccaggtgtgggcgtaccgggcgttggtgttcctggtgtcggcgtgccgggcgtgggtgttccgggcgtaggtgtcccaggtgtgggcgtaccgggcgttggtgttcctggtgtcggcgtgccgggcgtgggtgttccgggcgtaggtgtcccaggtgtgggcgtaccgggcgttggtgttcctggtgtcggcgtgccgggcgtgggtgttccgggcgtaggtgtcccaggtgtgggcgtaccgggcgttggtgttcctggtgtcggcgtgccgggcgtgggtgttccgggcgtaggtgtcccaggtgtgggcgtaccgggcgttggtgttcctggtgtcggcgtgccgggcgtgggtgttccgggcgtaggtgtcccaggtgtgggcgtaccgggcgttggtgttcctggtgtcggcgtgccgggcgtgggtgttccgggcgtaggtgtcccaggtgtgggcgtaccgggcgttggtgttcctggtgtcggcgtgccgggcgtgggtgttccgggcgtaggtgtcccaggtgtgggcgtaccgggcgttggtgttcctggtgtcggcgtgccgggcgtgggtgttccgggcgtaggtgtcccaggtgtgggcgtaccgggcgttggtgttcctggtgtcggcgtgccgggcgtgggtgttccgggcgtaggtgtcccaggtgtgggcgtaccgggcgttggtgttcctggtgtcggcgtgccgggcgtgggtgttccgggcgtaggtgtcccaggtgtgggcgtaccgggcgttggtgttcctggtgtcggcgtgccgggcgtgggtgttccgggcgtaggtgtcccaggtgtgggcgtaccgggcgttggtgttcctggtgtcggcgtgccgggcgtgggtgttccgggcgtaggtgtcccaggtgtgggcgtaccgggcgttggtgttcctggtgtcggcgtgccgggcgtgggtgttccgggcgtaggtgtcccaggtgtgggcgtaccgggcgttggtgttcctggtgtcggcgtgccgggcgtgggtgttccgggcgtaggtgtcccaggtgtgggcgtaccgggcgttggtgttcctggtgtcggcgtgccgggcaaaaaggttattgcgactaaggtattgggtacggttaagtggttcaatgtccgcaacggttacgggttcattaaccgtaatgatacgaaagaggacgtattcgttcatcagacggccattaaaaaaaacaatccccgtaagtacctgcgctctgtaggcgatggtgagacagttgaatttgacgttgtcgagggggagaaaggcgcagaagctgcgaatgttacgggaccaggctactgataatgatcttcaggatccgaattcgagctccgtcgacaagcttgcggccgcactcgagcaccaccaccaccaccactgagatccggctgctaacaaagcccgaaaggaagctgagttggctgctgccaccgctgagcaataactagcataaccccttggggcctctaaacgggtcttgaggggttttttgctgaaaggaggaactatatccggat

SEQ ID NO: 107 - DNA, 7047 bp, synthetic construct
  source 1..7047: mol_type = other DNA
tggcgaatgggacgcgccctgtagcggcgcattaagcgcggcgggtgtggtggttacgcgcagcgtgaccgctacacttgccagcgccctagcgcccgctcctttcgctttcttcccttcctttctcgccacgttcgccggctttccccgtcaagctctaaatcgggggctccctttagggttccgatttagtgctttacggcacctcgaccccaaaaaacttgattagggtgatggttcacgtagtgggccatcgccctgatagacggtttttcgccctttgacgttggagtccacgttctttaatagtggactcttgttccaaactggaacaacactcaaccctatctcggtctattcttttgatttataagggattttgccgatttcggcctattggttaaaaaatgagctgatttaacaaaaatttaacgcgaattttaacaaaatattaacgtttacaatttcaggtggcacttttcggggaaatgtgcgcggaacccctatttgtttatttttctaaatacattcaaatatgtatccgctcatgaattaattcttagaaaaactcatcgagcatcaaatgaaactgcaatttattcatatcaggattatcaataccatatttttgaaaaagccgtttctgtaatgaaggagaaaactcaccgaggcagttccataggatggcaagatcctggtatcggtctgcgattccgactcgtccaacatcaatacaacctattaatttcccctcgtcaaaaataaggttatcaagtgagaaatcaccatgagtgacgactgaatccggtgagaatggcaaaagtttatgcatttctttccagacttgttcaacaggccagccattacgctcgtcatcaaaatcactcgcatcaaccaaaccgttattcattcgtgattgcgcctgagcgagacgaaatacgcgatcgctgttaaaaggacaattacaaacaggaatcgaatgcaaccggcgcaggaacactgccagcgcatcaacaatattttcacctgaatcaggatattcttctaatacctggaatgctgttttcccggggatcgcagtggtgagtaaccatgcatcatcaggagtacggataaaatgcttgatggtcggaagaggcataaattccgtcagccagtttagtctgaccatctcatctgtaacatcattggcaacgctacctttgccatgtttcagaaacaactctggcgcatcgggcttcccatacaatcgatagattgtcgcacctgattgcccgacattatcgcgagcccatttatacccatataaatcagcatccatgttggaatttaatcgcggcctagagcaagacgtttcccgttgaatatggctcataacaccccttgtattactgtttatgtaagcagacagttttattgttcatgaccaaaatcccttaacgtgagttttcgttccactgagcgtcagaccccgtagaaaagatcaaaggatcttcttgagatcctttttttctgcgcgtaatctgctgcttgcaaacaaaaaaaccaccgctaccagcggtggtttgtttgccggatcaagagctaccaactctttttccgaaggtaactggcttcagcagagcgcagataccaaatactgtccttctagtgtagccgtagttaggccaccacttcaagaactctgtagcaccgcctacatacctcgctctgctaatcctgttaccagtggctgctgccagtggcgataagtcgtgtcttaccgggttggactcaagacgatagttaccggataaggcgcagcggtcgggctgaacggggggttcgtgcacacagcccagcttggagcgaacgacctacaccgaactgagatacctacagcgtgagctatgagaaagcgccacgcttcccgaagggagaaaggcggacaggtatccggtaagcggcagggtcggaacaggagagcgcacgagggagcttccagggggaaacgcctggtatctttatagtcctgtcgggtttcgccacctctgacttgagcgtcgatttttgtgatgctcgtcaggggggcggagcctatggaaaaacgccagcaacgcggcctttttacggttcctggccttttgctggccttttgctcacatgttctttcctgcgttatcccctgattctgtggataaccgtattaccgcctttgagtgagctgataccgctcgccgcagccgaacgaccgagcgcagcgagtcagtgagcgaggaagcggaagagcgcctgatgcggtattttctccttacgcatctgtgcggtatttcacaccgcatatatggtgcactctcagtacaatctgctctgatgccgcatagttaagccagtatacactccgctatcgctacgtgactgggtcatggctgcgccccgacacccgccaacacccgctgacgcgccctgacgggcttgtctgctcccggcatccgcttacagacaagctgtgaccgtctccgggagctgcatgtgtcagaggttttcaccgtcatcaccgaaacgcgcgaggcagctgcggtaaagctcatcagcgtggtcgtgaagcgattcacagatgtctgcctgttcatccgcgtccagctcgttgagtttctccagaagcgttaatgtctggcttctgataaagcgggccatgttaagggcggttttttcctgtttggtcactgatgcctccgtgtaagggggatttctgttcatgggggtaatgataccgatgaaacgagagaggatgctcacgatacgggttactgatgatgaacatgcccggttactggaacgttgtgagggtaaacaactggcggtatggatgcggcgggaccagagaaaaatcactcagggtcaatgccagcgcttcgttaatacagatgtaggtgttccacagggtagccagcagcatcctgcgatgcagatccggaacataatggtgcagggcgctgacttccgcgtttccagactttacgaaacacggaaaccgaagaccattcatgttgttgctcaggtcgcagacgttttgcagcagcagtcgcttcacgttcgctcgcgtatcggtgattcattctgctaaccagtaaggcaaccccgccagcctagccgggtcctcaacgacaggagcacgatcatgcgcacccgtggggccgccatgccggcgataatggcctgcttctcgccgaaacgtttggtggcgggaccagtgacgaaggcttgagcgagggcgtgcaagattccgaataccgcaagcgacaggccgatcatcgtcgcgctccagcgaaagcggtcctcgccgaaaatgacccagagcgctgccggcacctgtcctacgagttgcatgataaagaagacagtcataagtgcggcgacgatagtcatgccccgcgcccaccggaaggagctgactgggttgaaggctctcaagggcatcggtcgagatcccggtgcctaatgagtgagctaacttacattaattgcgttgcgctcactgcccgctttccagtcgggaaacctgtcgtgccagctgcattaatgaatcggccaacgcgcggggagaggcggtttgcgtattgggcgccagggtggtttttcttttcaccagtgagacgggcaacagctgattgcccttcaccgcctggccctgagagagttgcagcaagcggtccacgctggtttgccccagcaggcgaaaatcctgtttgatggtggttaacggcgggatataacatgagctgtcttcggtatcgtcgtatcccactaccgagatatccgcaccaacgcgcagcccggactcggtaatggcgcgcattgcgcccagcgccatctgatcgttggcaaccagcatcgcagtgggaacgatgccctcattcagcatttgcatggtttgttgaaaaccggacatggcactccagtcgccttcccgttccgctatcggctgaatttgattgcgagtgagatatttatgccagccagccagacgcagacgcgccgagacagaacttaatgggcccgctaacagcgcgatttgctggtgacccaatgcgaccagatgctccacgcccagtcgcgtaccgtcttcatgggagaaaataatactgttgatgggtgtctggtcagagacatcaagaaataacgccggaacattagtgcaggcagcttccacagcaatggcatcctggtcatccagcggatagttaatgatcagcccactgacgcgttgcgcgagaagattgtgcaccgccgctttacaggcttcgacgccgcttcgttctaccatcgacaccaccacgctggcacccagttgatcggcgcgagatttaatcgccgcgacaatttgcgacggcgcgtgcagggccagactggaggtggcaacgccaatcagcaacgactgtttgcccgccagttgttgtgccacgcggttgggaatgtaattcagctccgccatcgccgcttccactttttcccgcgttttcgcagaaacgtggctggcctggttcaccacgcgggaaacggtctgataagagacaccggcatactctgcgacatcgtataacgttactggtttcacattcaccaccctgaattgactctcttccgggcgctatcatgccataccgcgaaaggttttgcgccattcgatggtgtccgggatctcgacgctctcccttatgcgactcctgcattaggaagcagcccagtagtaggttgaggccgttgagcaccgccgccgcaaggaatggtgcatgcaaggagatggcgcccaacagtcccccggccacggggcctgccaccatacccacgccgaaacaagcgctcatgagcccgaagtggcgagcccgatcttccccatcggtgatgtcggcgatataggcgccagcaaccgcacctgtggcgccggtgatgccggccacgatgcgtccggcgtagaggatcgagatctcgatcccgcgaaattaatacgactcactataggggaattgtgagcggataacaattcccctctagaaataattttgtttaactttaagaaggaggagtacatatgggcgtgggtgttccgggcgtaggtgtcccaggtgtgggcgtaccgggcgttggtgttcctggtgtcggcgtgccgggcgtgggtgttccgggcgtaggtgtcccaggtgtgggcgtaccgggcgttggtgttcctggtgtcggcgtgccgggcgtgggtgttccgggcgtaggtgtcccaggtgtgggcgtaccgggcgttggtgttcctggtgtcggcgtgccgggcgtgggtgttccgggcgtaggtgtcccaggtgtgggcgtaccgggcgttggtgttcctggtgtcggcgtgccgggcgtgggtgttccgggcgtaggtgtcccaggtgtgggcgtaccgggcgttggtgttcctggtgtcggcgtgccgggcgtgggtgttccgggcgtaggtgtcccaggtgtgggcgtaccgggcgttggtgttcctggtgtcggcgtgccgggcgtgggtgttccgggcgtaggtgtcccaggtgtgggcgtaccgggcgttggtgttcctggtgtcggcgtgccgggcgtgggtgttccgggcgtaggtgtcccaggtgtgggcgtaccgggcgttggtgttcctggtgtcggcgtgccgggcgtgggtgttccgggcgtaggtgtcccaggtgtgggcgtaccgggcgttggtgttcctggtgtcggcgtgccgggcgtgggtgttccgggcgtaggtgtcccaggtgtgggcgtaccgggcgttggtgttcctggtgtcggcgtgccgggcgtgggtgttccgggcgtaggtgtcccaggtgtgggcgtaccgggcgttggtgttcctggtgtcggcgtgccgggcgtgggtgttccgggcgtaggtgtcccaggtgtgggcgtaccgggcgttggtgttcctggtgtcggcgtgccgggcgtgggtgttccgggcgtaggtgtcccaggtgtgggcgtaccgggcgttggtgttcctggtgtcggcgtgccgggcgtgggtgttccgggcgtaggtgtcccaggtgtgggcgtaccgggcgttggtgttcctggtgtcggcgtgccgggcgtgggtgttccgggcgtaggtgtcccaggtgtgggcgtaccgggcgttggtgttcctggtgtcggcgtgccgggcgtgggtgttccgggcgtaggtgtcccaggtgtgggcgtaccgggcgttggtgttcctggtgtcggcgtgccgggcaaacatcctcttcagaatcgttgggcgctttggttttttaagaatgacaaatctaaaacatggcaagcgaatcttcgtctgatttcaaagtttgacacagtggaagatttttgggccctttataatcacatccaattaagctctaatctgatgccagggtgcgactatagcttgtttaaggacggtattgaacccatgtgggaagatgaaaagaacaaacgcggtggacgttggcttattactttgaataaacagcagcgtcgtagtgatttagatcgtttctggcttgaaacactgctgtgccttatcggtgaatcctttgacgactactctgacgacgtatgtggcgcagtagtaaacgtgcgtgccaaaggggacaagatcgcaatctggacaacggagtgcgagaatcgtgaagccgttactcacatcggtcgtgtctacaaggaacgcttggggttgccgccaaagattgttatcggctatcagagccacgctgatacagcaaccaaaagcggatcgaccacgaagaatcgttttgtagtgggctactgataatgatcttcaggatccgaattcgagctccgtcgacaagcttgcggccgcactcgagcaccaccaccaccaccactgagatccggctgctaacaaagcccgaaaggaagctgagttggctgctgccaccgctgagcaataactagcataaccccttggggcctctaaacgggtcttgaggggttttttgctgaaaggaggaactatatccggat

SEQ ID NO: 108 - DNA, 6798 bp, synthetic construct
  source 1..6798: mol_type = other DNA
tggcgaatgggacgcgccctgtagcggcgcattaagcgcggcgggtgtggtggttacgcgcagcgtgaccgctacacttgccagcgccctagcgcccgctcctttcgctttcttcccttcctttctcgccacgttcgccggctttccccgtcaagctctaaatcgggggctccctttagggttccgatttagtgctttacggcacctcgaccccaaaaaacttgattagggtgatggttcacgtagtgggccatcgccctgatagacggtttttcgccctttgacgttggagtccacgttctttaatagtggactcttgttccaaactggaacaacactcaaccctatctcggtctattcttttgatttataagggattttgccgatttcggcctattggttaaaaaatgagctgatttaacaaaaatttaacgcgaattttaacaaaatattaacgtttacaatttcaggtggcacttttcggggaaatgtgcgcggaacccctatttgtttatttttctaaatacattcaaatatgtatccgctcatgaattaattcttagaaaaactcatcgagcatcaaatgaaactgcaatttattcatatcaggattatcaataccatatttttgaaaaagccgtttctgtaatgaaggagaaaactcaccgaggcagttccataggatggcaagatcctggtatcggtctgcgattccgactcgtccaacatcaatacaacctattaatttcccctcgtcaaaaataaggttatcaagtgagaaatcaccatgagtgacgactgaatccggtgagaatggcaaaagtttatgcatttctttccagacttgttcaacaggccagccattacgctcgtcatcaaaatcactcgcatcaaccaaaccgttattcattcgtgattgcgcctgagcgagacgaaatacgcgatcgctgttaaaaggacaattacaaacaggaatcgaatgcaaccggcgcaggaacactgccagcgcatcaacaatattttcacctgaatcaggatattcttctaatacctggaatgctgttttcccggggatcgcagtggtgagtaaccatgcatcatcaggagtacggataaaatgcttgatggtcggaagaggcataaattccgtcagccagtttagtctgaccatctcatctgtaacatcattggcaacgctacctttgccatgtttcagaaacaactctggcgcatcgggcttcccatacaatcgatagattgtcgcacctgattgcccgacattatcgcgagcccatttatacccatataaatcagcatccatgttggaatttaatcgcggcctagagcaagacgtttcccgttgaatatggctcataacaccccttgtattactgtttatgtaagcagacagttttattgttcatgaccaaaatcccttaacgtgagttttcgttccactgagcgtcagaccccgtagaaaagatcaaaggatcttcttgagatcctttttttctgcgcgtaatctgctgcttgcaaacaaaaaaaccaccgctaccagcggtggtttgtttgccggatcaagagctaccaactctttttccgaaggtaactggcttcagcagagcgcagataccaaatactgtccttctagtgtagccgtagttaggccaccacttcaagaactctgtagcaccgcctacatacctcgctctgctaatcctgttaccagtggctgctgccagtggcgataagtcgtgtcttaccgggttggactcaagacgatagttaccggataaggcgcagcggtcgggctgaacggggggttcgtgcacacagcccagcttggagcgaacgacctacaccgaactgagatacctacagcgtgagctatgagaaagcgccacgcttcccgaagggagaaaggcggacaggtatccggtaagcggcagggtcggaacaggagagcgcacgagggagcttccagggggaaacgcctggtatctttatagtcctgtcgggtttcgccacctctgacttgagcgtcgatttttgtgatgctcgtcaggggggcggagcctatggaaaaacgccagcaacgcggcctttttacggttcctggccttttgctggccttttgctcacatgttctttcctgcgttatcccctgattctgtggataaccgtattaccgcctttgagtgagctgataccgctcgccgcagccgaacgaccgagcgcagcgagtcagtgagcgaggaagcggaagagcgcctgatgcggtattttctccttacgcatctgtgcggtatttcacaccgcatatatggtgcactctcagtacaatctgctctgatgccgcatagttaagccagtatacactccgctatcgctacgtgactgggtcatggctgcgccccgacacccgccaacacccgctgacgcgccctgacgggcttgtctgctcccggcatccgcttacagacaagctgtgaccgtctccgggagctgcatgtgtcagaggttttcaccgtcatcaccgaaacgcgcgaggcagctgcggtaaagctcatcagcgtggtcgtgaagcgattcacagatgtctgcctgttcatccgcgtccagctcgttgagtttctccagaagcgttaatgtctggcttctgataaagcgggccatgttaagggcggttttttcctgtttggtcactgatgcctccgtgtaagggggatttctgttcatgggggtaatgataccgatgaaacgagagaggatgctcacgatacgggttactgatgatgaacatgcccggttactggaacgttgtgagggtaaacaactggcggtatggatgcggcgggaccagagaaaaatcactcagggtcaatgccagcgcttcgttaatacagatgtaggtgttccacagggtagccagcagcatcctgcgatgcagatccggaacataatggtgcagggcgctgacttccgcgtttccagactttacgaaacacggaaaccgaagaccattcatgttgttgctcaggtcgcagacgttttgcagcagcagtcgcttcacgttcgctcgcgtatcggtgattcattctgctaaccagtaaggcaaccccgccagcctagccgggtcctcaacgacaggagcacgatcatgcgcacccgtggggccgccatgccggcgataatggcctgcttctcgccgaaacgtttggtggcgggaccagtgacgaaggcttgagcgagggcgtgcaagattccgaataccgcaagcgacaggccgatcatcgtcgcgctccagcgaaagcggtcctcgccgaaaatgacccagagcgctgccggcacctgtcctacgagttgcatgataaagaagacagtcataagtgcggcgacgatagtcatgccccgcgcccaccggaaggagctgactgggttgaaggctctcaagggcatcggtcgagatcccggtgcctaatgagtgagctaacttacattaattgcgttgcgctcactgcccgctttccagtcgggaaacctgtcgtgccagctgcattaatgaatcggccaacgcgcggggagaggcggtttgcgtattgggcgccagggtggtttttcttttcaccagtgagacgggcaacagctgattgcccttcaccgcctggccctgagagagttgcagcaagcggtccacgctggtttgccccagcaggcgaaaatcctgtttgatggtggttaacggcgggatataacatgagctgtcttcggtatcgtcgtatcccactaccgagatatccgcaccaacgcgcagcccggactcggtaatggcgcgcattgcgcccagcgccatctgatcgttggcaaccagcatcgcagtgggaacgatgccctcattcagcatttgcatggtttgttgaaaaccggacatggcactccagtcgccttcccgttccgctatcggctgaatttgattgcgagtgagatatttatgccagccagccagacgcagacgcgccgagacagaacttaatgggcccgctaacagcgcgatttgctggtgacccaatgcgaccagatgctccacgcccagtcgcgtaccgtcttcatgggagaaaataatactgttgatgggtgtctggtcagagacatcaagaaataacgccggaacattagtgcaggcagcttccacagcaatggcatcctggtcatccagcggatagttaatgatcagcccactgacgcgttgcgcgagaagattgtgcaccgccgctttacaggcttcgacgccgcttcgttctaccatcgacaccaccacgctggcacccagttgatcggcgcgagatttaatcgccgcgacaatttgcgacggcgcgtgcagggccagactggaggtggcaacgccaatcagcaacgactgtttgcccgccagttgttgtgccacgcggttgggaatgtaattcagctccgccatcgccgcttccactttttcccgcgttttcgcagaaacgtggctggcctggttcaccacgcgggaaacggtctgataagagacaccggcatactctgcgacatcgtataacgttactggtttcacattcaccaccctgaattgactctcttccgggcgctatcatgccataccgcgaaaggttttgcgccattcgatggtgtccgggatctcgacgctctcccttatgcgactcctgcattaggaagcagcccagtagtaggttgaggccgttgagcaccgccgccgcaaggaatggtgcatgcaaggagatggcgcccaacagtcccccggccacggggcctgccaccatacccacgccgaaacaagcgctcatgagcccgaagtggcgagcccgatcttccccatcggtgatgtcggcgatataggcgccagcaaccgcacctgtggcgccggtgatgccggccacgatgcgtccggcgtagaggatcgagatctcgatcccgcgaaattaatacgactcactataggggaattgtgagcggataacaattcccctctagaaataattttgtttaactttaagaaggaggagtacatatgggcgtgggtgttccgggcgtaggtgtcccaggtgtgggcgtaccgggcgttggtgttcctggtgtcggcgtgccgggcgtgggtgttccgggcgtaggtgtcccaggtgtgggcgtaccgggcgttggtgttcctggtgtcggcgtgccgggcgtgggtgttccgggcgtaggtgtcccaggtgtgggcgtaccgggcgttggtgttcctggtgtcggcgtgccgggcgtgggtgttccgggcgtaggtgtcccaggtgtgggcgtaccgggcgttggtgttcctggtgtcggcgtgccgggcgtgggtgttccgggcgtaggtgtcccaggtgtgggcgtaccgggcgttggtgttcctggtgtcggcgtgccgggcgtgggtgttccgggcgtaggtgtcccaggtgtgggcgtaccgggcgttggtgttcctggtgtcggcgtgccgggcgtgggtgttccgggcgtaggtgtcccaggtgtgggcgtaccgggcgttggtgttcctggtgtcggcgtgccgggcgtgggtgttccgggcgtaggtgtcccaggtgtgggcgtaccgggcgttggtgttcctggtgtcggcgtgccgggcgtgggtgttccgggcgtaggtgtcccaggtgtgggcgtaccgggcgttggtgttcctggtgtcggcgtgccgggcgtgggtgttccgggcgtaggtgtcccaggtgtgggcgtaccgggcgttggtgttcctggtgtcggcgtgccgggcgtgggtgttccgggcgtaggtgtcccaggtgtgggcgtaccgggcgttggtgttcctggtgtcggcgtgccgggcgtgggtgttccgggcgtaggtgtcccaggtgtgggcgtaccgggcgttggtgttcctggtgtcggcgtgccgggcgtgggtgttccgggcgtaggtgtcccaggtgtgggcgtaccgggcgttggtgttcctggtgtcggcgtgccgggcgtgggtgttccgggcgtaggtgtcccaggtgtgggcgtaccgggcgttggtgttcctggtgtcggcgtgccgggcgtgggtgttccgggcgtaggtgtcccaggtgtgggcgtaccgggcgttggtgttcctggtgtcggcgtgccgggcgtgggtgttccgggcgtaggtgtcccaggtgtgggcgtaccgggcgttggtgttcctggtgtcggcgtgccgggcaatactgagaataagtcgcaacctaaacgtttgcacgtatctaacattccgttccgctttcgtgatcctgatttacgccagatgttcggccagtttggtaagattttggatgtagaaattatttttaatgaacgtgggagcaagggatttggctttgtcacgtttgaaaactcagcagacgctgaccgtgctcgtgaaaaattacatggaactgtggtggagggtcgcaagatcgaagttaataatgccacggcgcgtgttatgacgaacaaaaagaccgtcaacccgtacactaatggctactgataatgatcttcaggatccgaattcgagctccgtcgacaagcttgcggccgcactcgagcaccaccaccaccaccactgagatccggctgctaacaaagcccgaaaggaagctgagttggctgctgccaccgctgagcaataactagcataaccccttggggcctctaaacgggtcttgaggggttttttgctgaaaggaggaactatatccggat

SEQ ID NO: 109 - DNA, 7296 bp, synthetic construct
  source 1..7296: mol_type = other DNA
tggcgaatgggacgcgccctgtagcggcgcattaagcgcggcgggtgtggtggttacgcgcagcgtgaccgctacacttgccagcgccctagcgcccgctcctttcgctttcttcccttcctttctcgccacgttcgccggctttccccgtcaagctctaaatcgggggctccctttagggttccgatttagtgctttacggcacctcgaccccaaaaaacttgattagggtgatggttcacgtagtgggccatcgccctgatagacggtttttcgccctttgacgttggagtccacgttctttaatagtggactcttgttccaaactggaacaacactcaaccctatctcggtctattcttttgatttataagggattttgccgatttcggcctattggttaaaaaatgagctgatttaacaaaaatttaacgcgaattttaacaaaatattaacgtttacaatttcaggtggcacttttcggggaaatgtgcgcggaacccctatttgtttatttttctaaatacattcaaatatgtatccgctcatgaattaattcttagaaaaactcatcgagcatcaaatgaaactgcaatttattcatatcaggattatcaataccatatttttgaaaaagccgtttctgtaatgaaggagaaaactcaccgaggcagttccataggatggcaagatcctggtatcggtctgcgattccgactcgtccaacatcaatacaacctattaatttcccctcgtcaaaaataaggttatcaagtgagaaatcaccatgagtgacgactgaatccggtgagaatggcaaaagtttatgcatttctttccagacttgttcaacaggccagccattacgctcgtcatcaaaatcactcgcatcaaccaaaccgttattcattcgtgattgcgcctgagcgagacgaaatacgcgatcgctgttaaaaggacaattacaaacaggaatcgaatgcaaccggcgcaggaacactgccagcgcatcaacaatattttcacctgaatcaggatattcttctaatacctggaatgctgttttcccggggatcgcagtggtgagtaaccatgcatcatcaggagtacggataaaatgcttgatggtcggaagaggcataaattccgtcagccagtttagtctgaccatctcatctgtaacatcattggcaacgctacctttgccatgtttcagaaacaactctggcgcatcgggcttcccatacaatcgatagattgtcgcacctgattgcccgacattatcgcgagcccatttatacccatataaatcagcatccatgttggaatttaatcgcggcctagagcaagacgtttcccgttgaatatggctcataacaccccttgtattactgtttatgtaagcagacagttttattgttcatgaccaaaatcccttaacgtgagttttcgttccactgagcgtcagaccccgtagaaaagatcaaaggatcttcttgagatcctttttttctgcgcgtaatctgctgcttgcaaacaaaaaaaccaccgctaccagcggtggtttgtttgccggatcaagagctaccaactctttttccgaaggtaactggcttcagcagagcgcagataccaaatactgtccttctagtgtagccgtagttaggccaccacttcaagaactctgtagcaccgcctacatacctcgctctgctaatcctgttaccagtggctgctgccagtggcgataagtcgtgtcttaccgggttggactcaagacgatagttaccggataaggcgcagcggtcgggctgaacggggggttcgtgcacacagcccagcttggagcgaacgacctacaccgaactgagatacctacagcgtgagctatgagaaagcgccacgcttcccgaagggagaaaggcggacaggtatccggtaagcggcagggtcggaacaggagagcgcacgagggagcttccagggggaaacgcctggtatctttatagtcctgtcgggtttcgccacctctgacttgagcgtcgatttttgtgatgctcgtcaggggggcggagcctatggaaaaacgccagcaacgcggcctttttacggttcctggccttttgctggccttttgctcacatgttctttcctgcgttatcccctgattctgtggataaccgtattaccgcctttgagtgagctgataccgctcgccgcagccgaacgaccgagcgcagcgagtcagtgagcgaggaagcggaagagcgcctgatgcggtattttctccttacgcatctgtgcggtatttcacaccgcatatatggtgcactctcagtacaatctgctctgatgccgcatagttaagccagtatacactccgctatcgctacgtgactgggtcatggctgcgccccgacacccgccaacacccgctgacgcgccctgacgggcttgtctgctcccggcatccgcttacagacaagctgtgaccgtctccgggagctgcatgtgtcagaggttttcaccgtcatcaccgaaacgcgcgaggcagctgcggtaaagctcatcagcgtggtcgtgaagcgattcacagatgtctgcctgttcatccgcgtccagctcgttgagtttctccagaagcgttaatgtctggcttctgataaagcgggccatgttaagggcggttttttcctgtttggtcactgatgcctccgtgtaagggggatttctgttcatgggggtaatgataccgatgaaacgagagaggatgctcacgatacgggttactgatgatgaacatgcccggttactggaacgttgtgagggtaaacaactggcggtatggatgcggcgggaccagagaaaaatcactcagggtcaatgccagcgcttcgttaatacagatgtaggtgttccacagggtagccagcagcatcctgcgatgcagatccggaacataatggtgcagggcgctgacttccgcgtttccagactttacgaaacacggaaaccgaagaccattcatgttgttgctcaggtcgcagacgttttgcagcagcagtcgcttcacgttcgctcgcgtatcggtgattcattctgctaaccagtaaggcaaccccgccagcctagccgggtcctcaacgacaggagcacgatcatgcgcacccgtggggccgccatgccggcgataatggcctgcttctcgccgaaacgtttggtggcgggaccagtgacgaaggcttgagcgagggcgtgcaagattccgaataccgcaagcgacaggccgatcatcgtcgcgctccagcgaaagcggtcctcgccgaaaatgacccagagcgctgccggcacctgtcctacgagttgcatgataaagaagacagtcataagtgcggcgacgatagtcatgccccgcgcccaccggaaggagctgactgggttgaaggctctcaagggcatcggtcgagatcccggtgcctaatgagtgagctaacttacattaattgcgttgcgctcactgcccgctttccagtcgggaaacctgtcgtgccagctgcattaatgaatcggccaacgcgcggggagaggcggtttgcgtattgggcgccagggtggtttttcttttcaccagtgagacgggcaacagctgattgcccttcaccgcctggccctgagagagttgcagcaagcggtccacgctggtttgccccagcaggcgaaaatcctgtttgatggtggttaacggcgggatataacatgagctgtcttcggtatcgtcgtatcccactaccgagatatccgcaccaacgcgcagcccggactcggtaatggcgcgcattgcgcccagcgccatctgatcgttggcaaccagcatcgcagtgggaacgatgccctcattcagcatttgcatggtttgttgaaaaccggacatggcactccagtcgccttcccgttccgctatcggctgaatttgattgcgagtgagatatttatgccagccagccagacgcagacgcgccgagacagaacttaatgggcccgctaacagcgcgatttgctggtgacccaatgcgaccagatgctccacgcccagtcgcgtaccgtcttcatgggagaaaataatactgttgatgggtgtctggtcagagacatcaagaaataacgccggaacattagtgcaggcagcttccacagcaatggcatcctggtcatccagcggatagttaatgatcagcccactgacgcgttgcgcgagaagattgtgcaccgccgctttacaggcttcgacgccgcttcgttctaccatcgacaccaccacgctggcacccagttgatcggcgcgagatttaatcgccgcgacaatttgcgacggcgcgtgcagggccagactggaggtggcaacgccaatcagcaacgactgtttgcccgccagttgttgtgccacgcggttgggaatgtaattcagctccgccatcgccgcttccactttttcccgcgttttcgcagaaacgtggctggcctggttcaccacgcgggaaacggtctgataagagacaccggcatactctgcgacatcgtataacgttactggtttcacattcaccaccctgaattgactctcttccgggcgctatcatgccataccgcgaaaggttttgcgccattcgatggtgtccgggatctcgacgctctcccttatgcgactcctgcattaggaagcagcccagtagtaggttgaggccgttgagcaccgccgccgcaaggaatggtgcatgcaaggagatggcgcccaacagtcccccggccacggggcctgccaccatacccacgccgaaacaagcgctcatgagcccgaagtggcgagcccgatcttccccatcggtgatgtcggcgatataggcgccagcaaccgcacctgtggcgccggtgatgccggccacgatgcgtccggcgtagaggatcgagatctcgatcccgcgaaattaatacgactcactataggggaattgtgagcggataacaattcccctctagaaataattttgtttaactttaagaaggaggagtacatatgggcgtgggtgttccgggcgtaggtgtcccaggtgtgggcgtaccgggcgttggtgttcctggtgtcggcgtgccgggcgtgggtgttccgggcgtaggtgtcccaggtgtgggcgtaccgggcgttggtgttcctggtgtcggcgtgccgggcgtgggtgttccgggcgtaggtgtcccaggtgtgggcgtaccgggcgttggtgttcctggtgtcggcgtgccgggcgtgggtgttccgggcgtaggtgtcccaggtgtgggcgtaccgggcgttggtgttcctggtgtcggcgtgccgggcgtgggtgttccgggcgtaggtgtcccaggtgtgggcgtaccgggcgttggtgttcctggtgtcggcgtgccgggcgtgggtgttccgggcgtaggtgtcccaggtgtgggcgtaccgggcgttggtgttcctggtgtcggcgtgccgggcgtgggtgttccgggcgtaggtgtcccaggtgtgggcgtaccgggcgttggtgttcctggtgtcggcgtgccgggcgtgggtgttccgggcgtaggtgtcccaggtgtgggcgtaccgggcgttggtgttcctggtgtcggcgtgccgggcgtgggtgttccgggcgtaggtgtcccaggtgtgggcgtaccgggcgttggtgttcctggtgtcggcgtgccgggcgtgggtgttccgggcgtaggtgtcccaggtgtgggcgtaccgggcgttggtgttcctggtgtcggcgtgccgggcgtgggtgttccgggcgtaggtgtcccaggtgtgggcgtaccgggcgttggtgttcctggtgtcggcgtgccgggcgtgggtgttccgggcgtaggtgtcccaggtgtgggcgtaccgggcgttggtgttcctggtgtcggcgtgccgggcgtgggtgttccgggcgtaggtgtcccaggtgtgggcgtaccgggcgttggtgttcctggtgtcggcgtgccgggcgtgggtgttccgggcgtaggtgtcccaggtgtgggcgtaccgggcgttggtgttcctggtgtcggcgtgccgggcgtgggtgttccgggcgtaggtgtcccaggtgtgggcgtaccgggcgttggtgttcctggtgtcggcgtgccgggcgtgggtgttccgggcgtaggtgtcccaggtgtgggcgtaccgggcgttggtgttcctggtgtcggcgtgccgggcggtgggggttcagatagtgtatattcaggacagcaaccctctgtcggcaccgagatctttgtgggcaaaatcccgcgtgatctgttcgaggatgaactggttccgctgttcgaaaaggcgggtccgatttgggatctgcgtctgatgatggatccgctgaccggtttgaatcgcggttatgcgttcgtgacgttttgcaccaaagaagcggcgcaagaagcggtaaaactgtacaataaccacgaaattcgttctggtaaacatatcggcgtgtgcattagcgttgccaacaaccgtctattcgtgggcagcatcccgaaaagcaagaccaaagagcaaattttggaggaattttcgaaggtgactgagggcctgaccgatgttattctgtaccatcagccggacgacaaaaagaagaaccgcggtttttgtttcctggagtatgaagaccacaaaaccgcagcccaggctcgtcgcagacttatgagcggtaaggtcaaggtgtggggtaatgttgggaccgttgaatgggctgatccaatcgaggacccggacccggaagttatggccaaagttaaagtgctgttcgtgcgtaatctggcgaacaccgtcacggaggaaatcttggaaaaagcgttctcccagtttggtaagttggagcgtgttaagaaactgaaagactacgcgttcatccactttgatgagcgcgacggcgcagttaaggctatggaggaaatgaacggcaaggacttagagggtgaaaacattgaaatcgtgtttgcaaagccgcctgacggctactgataatgatcttcaggatccgaattcgagctccgtcgacaagcttgcggccgcactcgagcaccaccaccaccaccactgagatccggctgctaacaaagcccgaaaggaagctgagttggctgctgccaccgctgagcaataactagcataaccccttggggcctctaaacgggtcttgaggggttttttgctgaaaggaggaactatatccggat

SEQ ID NO: 110 - DNA, 6969 bp, synthetic construct
  source 1..6969: mol_type = other DNA
tggcgaatgggacgcgccctgtagcggcgcattaagcgcggcgggtgtggtggttacgcgcagcgtgaccgctacacttgccagcgccctagcgcccgctcctttcgctttcttcccttcctttctcgccacgttcgccggctttccccgtcaagctctaaatcgggggctccctttagggttccgatttagtgctttacggcacctcgaccccaaaaaacttgattagggtgatggttcacgtagtgggccatcgccctgatagacggtttttcgccctttgacgttggagtccacgttctttaatagtggactcttgttccaaactggaacaacactcaaccctatctcggtctattcttttgatttataagggattttgccgatttcggcctattggttaaaaaatgagctgatttaacaaaaatttaacgcgaattttaacaaaatattaacgtttacaatttcaggtggcacttttcggggaaatgtgcgcggaacccctatttgtttatttttctaaatacattcaaatatgtatccgctcatgaattaattcttagaaaaactcatcgagcatcaaatgaaactgcaatttattcatatcaggattatcaataccatatttttgaaaaagccgtttctgtaatgaaggagaaaactcaccgaggcagttccataggatggcaagatcctggtatcggtctgcgattccgactcgtccaacatcaatacaacctattaatttcccctcgtcaaaaataaggttatcaagtgagaaatcaccatgagtgacgactgaatccggtgagaatggcaaaagtttatgcatttctttccagacttgttcaacaggccagccattacgctcgtcatcaaaatcactcgcatcaaccaaaccgttattcattcgtgattgcgcctgagcgagacgaaatacgcgatcgctgttaaaaggacaattacaaacaggaatcgaatgcaaccggcgcaggaacactgccagcgcatcaacaatattttcacctgaatcaggatattcttctaatacctggaatgctgttttcccggggatcgcagtggtgagtaaccatgcatcatcaggagtacggataaaatgcttgatggtcggaagaggcataaattccgtcagccagtttagtctgaccatctcatctgtaacatcattggcaacgctacctttgccatgtttcagaaacaactctggcgcatcgggcttcccatacaatcgatagattgtcgcacctgattgcccgacattatcgcgagcccatttatacccatataaatcagcatccatgttggaatttaatcgcggcctagagcaagacgtttcccgttgaatatggctcataacaccccttgtattactgtttatgtaagcagacagttttattgttcatgaccaaaatcccttaacgtgagttttcgttccactgagcgtcagaccccgtagaaaagatcaaaggatcttcttgagatcctttttttctgcgcgtaatctgctgcttgcaaacaaaaaaaccaccgctaccagcggtggtttgtttgccggatcaagagctaccaactctttttccgaaggtaactggcttcagcagagcgcagataccaaatactgtccttctagtgtagccgtagttaggccaccacttcaagaactctgtagcaccgcctacatacctcgctctgctaatcctgttaccagtggctgctgccagtggcgataagtcgtgtcttaccgggttggactcaagacgatagttaccggataaggcgcagcggtcgggctgaacggggggttcgtgcacacagcccagcttggagcgaacgacctacaccgaactgagatacctacagcgtgagctatgagaaagcgccacgcttcccgaagggagaaaggcggacaggtatccggtaagcggcagggtcggaacaggagagcgcacgagggagcttccagggggaaacgcctggtatctttatagtcctgtcgggtttcgccacctctgacttgagcgtcgatttttgtgatgctcgtcaggggggcggagcctatggaaaaacgccagcaacgcggcctttttacggttcctggccttttgctggccttttgctcacatgttctttcctgcgttatcccctgattctgtggataaccgtattaccgcctttgagtgagctgataccgctcgccgcagccgaacgaccgagcgcagcgagtcagtgagcgaggaagcggaagagcgcctgatgcggtattttctccttacgcatctgtgcggtatttcacaccgcatatatggtgcactctcagtacaatctgctctgatgccgcatagttaagccagtatacactccgctatcgctacgtgactgggtcatggctgcgccccgacacccgccaacacccgctgacgcgccctgacgggcttgtctgctcccggcatccgcttacagacaagctgtgaccgtctccgggagctgcatgtgtcagaggttttcaccgtcatcaccgaaacgcgcgaggcagctgcggtaaagctcatcagcgtggtcgtgaagcgattcacagatgtctgcctgttcatccgcgtccagctcgttgagtttctccagaagcgttaatgtctggcttctgataaagcgggccatgttaagggcggttttttcctgtttggtcactgatgcctccgtgtaagggggatttctgttcatgggggtaatgataccgatgaaacgagagaggatgctcacgatacgggttactgatgatgaacatgcccggttactggaacgttgtgagggtaaacaactggcggtatggatgcggcgggaccagagaaaaatcactcagggtcaatgccagcgcttcgttaatacagatgtaggtgttccacagggtagccagcagcatcctgcgatgcagatccggaacataatggtgcagggcgctgacttccgcgtttccagactttacgaaacacggaaaccgaagaccattcatgttgttgctcaggtcgcagacgttttgcagcagcagtcgcttcacgttcgctcgcgtatcggtgattcattctgctaaccagtaaggcaaccccgccagcctagccgggtcctcaacgacaggagcacgatcatgcgcacccgtggggccgccatgccggcgataatggcctgcttctcgccgaaacgtttggtggcgggaccagtgacgaaggcttgagcgagggcgtgcaagattccgaataccgcaagcgacaggccgatcatcgtcgcgctccagcgaaagcggtcctcgccgaaaatgacccagagcgctgccggcacctgtcctacgagttgcatgataaagaagacagtcataagtgcggcgacgatagtcatgccccgcgcccaccggaaggagctgactgggttgaaggctctcaagggcatcggtcgagatcccggtgcctaatgagtgagctaacttacattaattgcgttgcgctcactgcccgctttccagtcgggaaacctgtcgtgccagctgcattaatgaatcggccaacgcgcggggagaggcggtttgcgtattgggcgccagggtggtttttcttttcaccagtgagacgggcaacagctgattgcccttcaccgcctggccctgagagagttgcagcaagcggtccacgctggtttgccccagcaggcgaaaatcctgtttgatggtggttaacggcgggatataacatgagctgtcttcggtatcgtcgtatcccactaccgagatatccgcaccaacgcgcagcccggactcggtaatggcgcgcattgcgcccagcgccatctgatcgttggcaaccagcatcgcagtgggaacgatgccctcattcagcatttgcatggtttgttgaaaaccggacatggcactccagtcgccttcccgttccgctatcggctgaatttgattgcgagtgagatatttatgccagccagccagacgcagacgcgccgagacagaacttaatgggcccgctaacagcgcgatttgctggtgacccaatgcgaccagatgctccacgcccagtcgcgtaccgtcttcatgggagaaaataatactgttgatgggtgtctggtcagagacatcaagaaataacgccggaacattagtgcaggcagcttccacagcaatggcatcctggtcatccagcggatagttaatgatcagcccactgacgcgttgcgcgagaagattgtgcaccgccgctttacaggcttcgacgccgcttcgttctaccatcgacaccaccacgctggcacccagttgatcggcgcgagatttaatcgccgcgacaatttgcgacggcgcgtgcagggccagactggaggtggcaacgccaatcagcaacgactgtttgcccgccagttgttgtgccacgcggttgggaatgtaattcagctccgccatcgccgcttccactttttcccgcgttttcgcagaaacgtggctggcctggttcaccacgcgggaaacggtctgataagagacaccggcatactctgcgacatcgtataacgttactggtttcacattcaccaccctgaattgactctcttccgggcgctatcatgccataccgcgaaaggttttgcgccattcgatggtgtccgggatctcgacgctctcccttatgcgactcctgcattaggaagcagcccagtagtaggttgaggccgttgagcaccgccgccgcaaggaatggtgcatgcaaggagatggcgcccaacagtcccccggccacggggcctgccaccatacccacgccgaaacaagcgctcatgagcccgaagtggcgagcccgatcttccccatcggtgatgtcggcgatataggcgccagcaaccgcacctgtggcgccggtgatgccggccacgatgcgtccggcgtagaggatcgagatctcgatcccgcgaaattaatacgactcactataggggaattgtgagcggataacaattcccctctagaaataattttgtttaactttaagaaggaggagtacatatgggcgtgggtgttccgggcgtaggtgtcccaggtgtgggcgtaccgggcgttggtgttcctggtgtcggcgtgccgggcgtgggtgttccgggcgtaggtgtcccaggtgtgggcgtaccgggcgttggtgttcctggtgtcggcgtgccgggcgtgggtgttccgggcgtaggtgtcccaggtgtgggcgtaccgggcgttggtgttcctggtgtcggcgtgccgggcgtgggtgttccgggcgtaggtgtcccaggtgtgggcgtaccgggcgttggtgttcctggtgtcggcgtgccgggcgtgggtgttccgggcgtaggtgtcccaggtgtgggcgtaccgggcgttggtgttcctggtgtcggcgtgccgggcgtgggtgttccgggcgtaggtgtcccaggtgtgggcgtaccgggcgttggtgttcctggtgtcggcgtgccgggcgtgggtgttccgggcgtaggtgtcccaggtgtgggcgtaccgggcgttggtgttcctggtgtcggcgtgccgggcgtgggtgttccgggcgtaggtgtcccaggtgtgggcgtaccgggcgttggtgttcctggtgtcggcgtgccgggcgtgggtgttccgggcgtaggtgtcccaggtgtgggcgtaccgggcgttggtgttcctggtgtcggcgtgccgggcgtgggtgttccgggcgtaggtgtcccaggtgtgggcgtaccgggcgttggtgttcctggtgtcggcgtgccgggcgtgggtgttccgggcgtaggtgtcccaggtgtgggcgtaccgggcgttggtgttcctggtgtcggcgtgccgggcgtgggtgttccgggcgtaggtgtcccaggtgtgggcgtaccgggcgttggtgttcctggtgtcggcgtgccgggcgtgggtgttccgggcgtaggtgtcccaggtgtgggcgtaccgggcgttggtgttcctggtgtcggcgtgccgggcgtgggtgttccgggcgtaggtgtcccaggtgtgggcgtaccgggcgttggtgttcctggtgtcggcgtgccgggcgtgggtgttccgggcgtaggtgtcccaggtgtgggcgtaccgggcgttggtgttcctggtgtcggcgtgccgggcgtgggtgttccgggcgtaggtgtcccaggtgtgggcgtaccgggcgttggtgttcctggtgtcggcgtgccgggcggtgggggttcaatgagtgaactatcagtagctcaaaaacccgagaagctgttggagcgctgtaagtactggcctgcctgcaagaatggtgatgaatgcgcgtatcaccaccccatcagcccgtgtaaggcgtttccgaactgcaagtttgcagaaaagtgcctgtttgttcatccgaattgcaaatacgacgcaaaatgcaccaaaccggattgtccgttcacccatgttagccgtagaatcccggtcctctccccgaaaccggctgtggctccgccagcgccaccgtctagctcgcaactgtgccgttatttcccggcgtgcaagaaaatggagtgcccgttctaccacccgaaacactgccgtttcaacacccagtgtacgcgtccggactgtactttttatcacccgaccattaacgtgccgcctcgtcatgcgctgaaatggattcgcccgcagaccagcgaaggctactgataatgatcttcaggatccgaattcgagctccgtcgacaagcttgcggccgcactcgagcaccaccaccaccaccactgagatccggctgctaacaaagcccgaaaggaagctgagttggctgctgccaccgctgagcaataactagcataaccccttggggcctctaaacgggtcttgaggggttttttgctgaaaggaggaactatatccggat

SEQ ID NO: 111 - DNA, 7032 bp, synthetic construct
  source 1..7032: mol_type = other DNA
tggcgaatgggacgcgccctgtagcggcgcattaagcgcggcgggtgtggtggttacgcgcagcgtgaccgctacacttgccagcgccctagcgcccgctcctttcgctttcttcccttcctttctcgccacgttcgccggctttccccgtcaagctctaaatcgggggctccctttagggttccgatttagtgctttacggcacctcgaccccaaaaaacttgattagggtgatggttcacgtagtgggccatcgccctgatagacggtttttcgccctttgacgttggagtccacgttctttaatagtggactcttgttccaaactggaacaacactcaaccctatctcggtctattcttttgatttataagggattttgccgatttcggcctattggttaaaaaatgagctgatttaacaaaaatttaacgcgaattttaacaaaatattaacgtttacaatttcaggtggcacttttcggggaaatgtgcgcggaacccctatttgtttatttttctaaatacattcaaatatgtatccgctcatgaattaattcttagaaaaactcatcgagcatcaaatgaaactgcaatttattcatatcaggattatcaataccatatttttgaaaaagccgtttctgtaatgaaggagaaaactcaccgaggcagttccataggatggcaagatcctggtatcggtctgcgattccgactcgtccaacatcaatacaacctattaatttcccctcgtcaaaaataaggttatcaagtgagaaatcaccatgagtgacgactgaatccggtgagaatggcaaaagtttatgcatttctttccagacttgttcaacaggccagccattacgctcgtcatcaaaatcactcgcatcaaccaaaccgttattcattcgtgattgcgcctgagcgagacgaaatacgcgatcgctgttaaaaggacaattacaaacaggaatcgaatgcaaccggcgcaggaacactgccagcgcatcaacaatattttcacctgaatcaggatattcttctaatacctggaatgctgttttcccggggatcgcagtggtgagtaaccatgcatcatcaggagtacggataaaatgcttgatggtcggaagaggcataaattccgtcagccagtttagtctgaccatctcatctgtaacatcattggcaacgctacctttgccatgtttcagaaacaactctggcgcatcgggcttcccatacaatcgatagattgtcgcacctgattgcccgacattatcgcgagcccatttatacccatataaatcagcatccatgttggaatttaatcgcggcctagagcaagacgtttcccgttgaatatggctcataacaccccttgtattactgtttatgtaagcagacagttttattgttcatgaccaaaatcccttaacgtgagttttcgttccactgagcgtcagaccccgtagaaaagatcaaaggatcttcttgagatcctttttttctgcgcgtaatctgctgcttgcaaacaaaaaaaccaccgctaccagcggtggtttgtttgccggatcaagagctaccaactctttttccgaaggtaactggcttcagcagagcgcagataccaaatactgtccttctagtgtagccgtagttaggccaccacttcaagaactctgtagcaccgcctacatacctcgctctgctaatcctgttaccagtggctgctgccagtggcgataagtcgtgtcttaccgggttggactcaagacgatagttaccggataaggcgcagcggtcgggctgaacggggggttcgtgcacacagcccagcttggagcgaacgacctacaccgaactgagatacctacagcgtgagctatgagaaagcgccacgcttcccgaagggagaaaggcggacaggtatccggtaagcggcagggtcggaacaggagagcgcacgagggagcttccagggggaaacgcctggtatctttatagtcctgtcgggtttcgccacctctgacttgagcgtcgatttttgtgatgctcgtcaggggggcggagcctatggaaaaacgccagcaacgcggcctttttacggttcctggccttttgctggccttttgctcacatgttctttcctgcgttatcccctgattctgtggataaccgtattaccgcctttgagtgagctgataccgctcgccgcagccgaacgaccgagcgcagcgagtcagtgagcgaggaagcggaagagcgcctgatgcggtattttctccttacgcatctgtgcggtatttcacaccgcatatatggtgcactctcagtacaatctgctctgatgccgcatagttaagccagtatacactccgctatcgctacgtgactgggtcatggctgcgccccgacacccgccaacacccgctgacgcgccctgacgggcttgtctgctcccggcatccgcttacagacaagctgtgaccgtctccgggagctgcatgtgtcagaggttttcaccgtcatcaccgaaacgcgcgaggcagctgcggtaaagctcatcagcgtggtcgtgaagcgattcacagatgtctgcctgttcatccgcgtccagctcgttgagtttctccagaagcgttaatgtctggcttctgataaagcgggccatgttaagggcggttttttcctgtttggtcactgatgcctccgtgtaagggggatttctgttcatgggggtaatgataccgatgaaacgagagaggatgctcacgatacgggttactgatgatgaacatgcccggttactggaacgttgtgagggtaaacaactggcggtatggatgcggcgggaccagagaaaaatcactcagggtcaatgccagcgcttcgttaatacagatgtaggtgttccacagggtagccagcagcatcctgcgatgcagatccggaacataatggtgcagggcgctgacttccgcgtttccagactttacgaaacacggaaaccgaagaccattcatgttgttgctcaggtcgcagacgttttgcagcagcagtcgcttcacgttcgctcgcgtatcggtgattcattctgctaaccagtaaggcaaccccgccagcctagccgggtcctcaacgacaggagcacgatcatgcgcacccgtggggccgccatgccggcgataatggcctgcttctcgccgaaacgtttggtggcgggaccagtgacgaaggcttgagcgagggcgtgcaagattccgaataccgcaagcgacaggccgatcatcgtcgcgctccagcgaaagcggtcctcgccgaaaatgacccagagcgctgccggcacctgtcctacgagttgcatgataaagaagacagtcataagtgcggcgacgatagtcatgccccgcgcccaccggaaggagctgactgggttgaaggctctcaagggcatcggtcgagatcccggtgcctaatgagtgagctaacttacattaattgcgttgcgctcactgcccgctttccagtcgggaaacctgtcgtgccagctgcattaatgaatcggccaacgcgcggggagaggcggtttgcgtattgggcgccagggtggtttttcttttcaccagtgagacgggcaacagctgattgcccttcaccgcctggccctgagagagttgcagcaagcggtccacgctggtttgccccagcaggcgaaaatcctgtttgatggtggttaacggcgggatataacatgagctgtcttcggtatcgtcgtatcccactaccgagatatccgcaccaacgcgcagcccggactcggtaatggcgcgcattgcgcccagcgccatctgatcgttggcaaccagcatcgcagtgggaacgatgccctcattcagcatttgcatggtttgttgaaaaccggacatggcactccagtcgccttcccgttccgctatcggctgaatttgattgcgagtgagatatttatgccagccagccagacgcagacgcgccgagacagaacttaatgggcccgctaacagcgcgatttgctggtgacccaatgcgaccagatgctccacgcccagtcgcgtaccgtcttcatgggagaaaataatactgttgatgggtgtctggtcagagacatcaagaaataacgccggaacattagtgcaggcagcttccacagcaatggcatcctggtcatccagcggatagttaatgatcagcccactgacgcgttgcgcgagaagattgtgcaccgccgctttacaggcttcgacgccgcttcgttctaccatcgacaccaccacgctggcacccagttgatcggcgcgagatttaatcgccgcgacaatttgcgacggcgcgtgcagggccagactggaggtggcaacgccaatcagcaacgactgtttgcccgccagttgttgtgccacgcggttgggaatgtaattcagctccgccatcgccgcttccactttttcccgcgttttcgcagaaacgtggctggcctggttcaccacgcgggaaacggtctgataagagacaccggcatactctgcgacatcgtataacgttactggtttcacattcaccaccctgaattgactctcttccgggcgctatcatgccataccgcgaaaggttttgcgccattcgatggtgtccgggatctcgacgctctcccttatgcgactcctgcattaggaagcagcccagtagtaggttgaggccgttgagcaccgccgccgcaaggaatggtgcatgcaaggagatggcgcccaacagtcccccggccacggggcctgccaccatacccacgccgaaacaagcgctcatgagcccgaagtggcgagcccgatcttccccatcggtgatgtcggcgatataggcgccagcaaccgcacctgtggcgccggtgatgccggccacgatgcgtccggcgtagaggatcgagatctcgatcccgcgaaattaatacgactcactataggggaattgtgagcggataacaattcccctctagaaataattttgtttaactttaagaaggaggagtacatatgagcaaagggccgggcgtgggtgttccgggcgtaggtgtcccaggtgtgggcgtaccgggcgttggtgttcctggtgtcggcgtgccgggcgtgggtgttccgggcgtaggtgtcccaggtgtgggcgtaccgggcgttggtgttcctggtgtcggcgtgccgggcgtgggtgttccgggcgtaggtgtcccaggtgtgggcgtaccgggcgttggtgttcctggtgtcggcgtgccgggcgtgggtgttccgggcgtaggtgtcccaggtgtgggcgtaccgggcgttggtgttcctggtgtcggcgtgccgggcgtgggtgttccgggcgtaggtgtcccaggtgtgggcgtaccgggcgttggtgttcctggtgtcggcgtgccgggcgtgggtgttccgggcgtaggtgtcccaggtgtgggcgtaccgggcgttggtgttcctggtgtcggcgtgccgggcgtgggtgttccgggcgtaggtgtcccaggtgtgggcgtaccgggcgttggtgttcctggtgtcggcgtgccgggcgtgggtgttccgggcgtaggtgtcccaggtgtgggcgtaccgggcgttggtgttcctggtgtcggcgtgccgggcgtgggtgttccgggcgtaggtgtcccaggtgtgggcgtaccgggcgttggtgttcctggtgtcggcgtgccgggcgtgggtgttccgggcgtaggtgtcccaggtgtgggcgtaccgggcgttggtgttcctggtgtcggcgtgccgggcgtgggtgttccgggcgtaggtgtcccaggtgtgggcgtaccgggcgttggtgttcctggtgtcggcgtgccgggcgtgggtgttccgggcgtaggtgtcccaggtgtgggcgtaccgggcgttggtgttcctggtgtcggcgtgccgggcgtgggtgttccgggcgtaggtgtcccaggtgtgggcgtaccgggcgttggtgttcctggtgtcggcgtgccgggcgtgggtgttccgggcgtaggtgtcccaggtgtgggcgtaccgggcgttggtgttcctggtgtcggcgtgccgggcgtgggtgttccgggcgtaggtgtcccaggtgtgggcgtaccgggcgttggtgttcctggtgtcggcgtgccgggcgtgggtgttccgggcgtaggtgtcccaggtgtgggcgtaccgggcgttggtgttcctggtgtcggcgtgccgggcagctacccaatggcgagcctgtatgtcggagaccttcaccctgatgttaccgaggccatgctgtatgagaaattcagcccagctggtccgatcctttccattcgcgtgtgccgcgatatgatcacacgtcgttcccttggttacgcctatgtaaattttcaacaaccagccgatgcagaacgcgccttggacactatgaatttcgatgtgattaagggtaaaccggttcgcattatgtggtcccaacgtgatccttcgcttcgcaagtctggggtagggaacatctttattaaaaatctggacaagtccattgataacaaagcattatatgataccttctcagcgttcgggaacattttatcctgtaaggttgtgtgcgacgaaaatggaagcaaaggctatggctttgtacattttgagacacaggaggcggcagagcgtgccattgaaaagatgaatggaatgttacttaatgaccgtaaggtgttcgtcggtcgttttaaatcgcgcaaggaacgcggctactgataatgatcttcaggatccgaattcgagctccgtcgacaagcttgcggccgcactcgagcaccaccaccaccaccactgagatccggctgctaacaaagcccgaaaggaagctgagttggctgctgccaccgctgagcaataactagcataaccccttggggcctctaaacgggtcttgaggggttttttgctgaaaggaggaactatatccggat

SEQ ID NO: 112 - DNA, 7077 bp, synthetic construct
  source 1..7077: mol_type = other DNA
tggcgaatgggacgcgccctgtagcggcgcattaagcgcggcgggtgtggtggttacgcgcagcgtgaccgctacacttgccagcgccctagcgcccgctcctttcgctttcttcccttcctttctcgccacgttcgccggctttccccgtcaagctctaaatcgggggctccctttagggttccgatttagtgctttacggcacctcgaccccaaaaaacttgattagggtgatggttcacgtagtgggccatcgccctgatagacggtttttcgccctttgacgttggagtccacgttctttaatagtggactcttgttccaaactggaacaacactcaaccctatctcggtctattcttttgatttataagggattttgccgatttcggcctattggttaaaaaatgagctgatttaacaaaaatttaacgcgaattttaacaaaatattaacgtttacaatttcaggtggcacttttcggggaaatgtgcgcggaacccctatttgtttatttttctaaatacattcaaatatgtatccgctcatgaattaattcttagaaaaactcatcgagcatcaaatgaaactgcaatttattcatatcaggattatcaataccatatttttgaaaaagccgtttctgtaatgaaggagaaaactcaccgaggcagttccataggatggcaagatcctggtatcggtctgcgattccgactcgtccaacatcaatacaacctattaatttcccctcgtcaaaaataaggttatcaagtgagaaatcaccatgagtgacgactgaatccggtgagaatggcaaaagtttatgcatttctttccagacttgttcaacaggccagccattacgctcgtcatcaaaatcactcgcatcaaccaaaccgttattcattcgtgattgcgcctgagcgagacgaaatacgcgatcgctgttaaaaggacaattacaaacaggaatcgaatgcaaccggcgcaggaacactgccagcgcatcaacaatattttcacctgaatcaggatattcttctaatacctggaatgctgttttcccggggatcgcagtggtgagtaaccatgcatcatcaggagtacggataaaatgcttgatggtcggaagaggcataaattccgtcagccagtttagtctgaccatctcatctgtaacatcattggcaacgctacctttgccatgtttcagaaacaactctggcgcatcgggcttcccatacaatcgatagattgtcgcacctgattgcccgacattatcgcgagcccatttatacccatataaatcagcatccatgttggaatttaatcgcggcctagagcaagacgtttcccgttgaatatggctcataacaccccttgtattactgtttatgtaagcagacagttttattgttcatgaccaaaatcccttaacgtgagttttcgttccactgagcgtcagaccccgtagaaaagatcaaaggatcttcttgagatcctttttttctgcgcgtaatctgctgcttgcaaacaaaaaaaccaccgctaccagcggtggtttgtttgccggatcaagagctaccaactctttttccgaaggtaactggcttcagcagagcgcagataccaaatactgtccttctagtgtagccgtagttaggccaccacttcaagaactctgtagcaccgcctacatacctcgctctgctaatcctgttaccagtggctgctgccagtggcgataagtcgtgtcttaccgggttggactcaagacgatagttaccggataaggcgcagcggtcgggctgaacggggggttcgtgcacacagcccagcttggagcgaacgacctacaccgaactgagatacctacagcgtgagctatgagaaagcgccacgcttcccgaagggagaaaggcggacaggtatccggtaagcggcagggtcggaacaggagagcgcacgagggagcttccagggggaaacgcctggtatctttatagtcctgtcgggtttcgccacctctgacttgagcgtcgatttttgtgatgctcgtcaggggggcggagcctatggaaaaacgccagcaacgcggcctttttacggttcctggccttttgctggccttttgctcacatgttctttcctgcgttatcccctgattctgtggataaccgtattaccgcctttgagtgagctgataccgctcgccgcagccgaacgaccgagcgcagcgagtcagtgagcgaggaagcggaagagcgcctgatgcggtattttctccttacgcatctgtgcggtatttcacaccgcatatatggtgcactctcagtacaatctgctctgatgccgcatagttaagccagtatacactccgctatcgctacgtgactgggtcatggctgcgccccgacacccgccaacacccgctgacgcgccctgacgggcttgtctgctcccggcatccgcttacagacaagctgtgaccgtctccgggagctgcatgtgtcagaggttttcaccgtcatcaccgaaacgcgcgaggcagctgcggtaaagctcatcagcgtggtcgtgaagcgattcacagatgtctgcctgttcatccgcgtccagctcgttgagtttctccagaagcgttaatgtctggcttctgataaagcgggccatgttaagggcggttttttcctgtttggtcactgatgcctccgtgtaagggggatttctgttcatgggggtaatgataccgatgaaacgagagaggatgctcacgatacgggttactgatgatgaacatgcccggttactggaacgttgtgagggtaaacaactggcggtatggatgcggcgggaccagagaaaaatcactcagggtcaatgccagcgcttcgttaatacagatgtaggtgttccacagggtagccagcagcatcctgcgatgcagatccggaacataatggtgcagggcgctgacttccgcgtttccagactttacgaaacacggaaaccgaagaccattcatgttgttgctcaggtcgcagacgttttgcagcagcagtcgcttcacgttcgctcgcgtatcggtgattcattctgctaaccagtaaggcaaccccgccagcctagccgggtcctcaacgacaggagcacgatcatgcgcacccgtggggccgccatgccggcgataatggcctgcttctcgccgaaacgtttggtggcgggaccagtgacgaaggcttgagcgagggcgtgcaagattccgaataccgcaagcgacaggccgatcatcgtcgcgctccagcgaaagcggtcctcgccgaaaatgacccagagcgctgccggcacctgtcctacgagttgcatgataaagaagacagtcataagtgcggcgacgatagtcatgccccgcgcccaccggaaggagctgactgggttgaaggctctcaagggcatcggtcgagatcccggtgcctaatgagtgagctaacttacattaattgcgttgcgctcactgcccgctttccagtcgggaaacctgtcgtgccagctgcattaatgaatcggccaacgcgcggggagaggcggtttgcgtattgggcgccagggtggtttttcttttcaccagtgagacgggcaacagctgattgcccttcaccgcctggccctgagagagttgcagcaagcggtccacgctggtttgccccagcaggcgaaaatcctgtttgatggtggttaacggcgggatataacatgagctgtcttcggtatcgtcgtatcccactaccgagatatccgcaccaacgcgcagcccggactcggtaatggcgcgcattgcgcccagcgccatctgatcgttggcaaccagcatcgcagtgggaacgatgccctcattcagcatttgcatggtttgttgaaaaccggacatggcactccagtcgccttcccgttccgctatcggctgaatttgattgcgagtgagatatttatgccagccagccagacgcagacgcgccgagacagaacttaatgggcccgctaacagcgcgatttgctggtgacccaatgcgaccagatgctccacgcccagtcgcgtaccgtcttcatgggagaaaataatactgttgatgggtgtctggtcagagacatcaagaaataacgccggaacattagtgcaggcagcttccacagcaatggcatcctggtcatccagcggatagttaatgatcagcccactgacgcgttgcgcgagaagattgtgcaccgccgctttacaggcttcgacgccgcttcgttctaccatcgacaccaccacgctggcacccagttgatcggcgcgagatttaatcgccgcgacaatttgcgacggcgcgtgcagggccagactggaggtggcaacgccaatcagcaacgactgtttgcccgccagttgttgtgccacgcggttgggaatgtaattcagctccgccatcgccgcttccactttttcccgcgttttcgcagaaacgtggctggcctggttcaccacgcgggaaacggtctgataagagacaccggcatactctgcgacatcgtataacgttactggtttcacattcaccaccctgaattgactctcttccgggcgctatcatgccataccgcgaaaggttttgcgccattcgatggtgtccgggatctcgacgctctcccttatgcgactcctgcattaggaagcagcccagtagtaggttgaggccgttgagcaccgccgccgcaaggaatggtgcatgcaaggagatggcgcccaacagtcccccggccacggggcctgccaccatacccacgccgaaacaagcgctcatgagcccgaagtggcgagcccgatcttccccatcggtgatgtcggcgatataggcgccagcaaccgcacctgtggcgccggtgatgccggccacgatgcgtccggcgtagaggatcgagatctcgatcccgcgaaattaatacgactcactataggggaattgtgagcggataacaattcccctctagaaataattttgtttaactttaagaaggaggagtacatatgagcaaagggccgggcgtgggtgttccgggcgtaggtgtcccaggtgtgggcgtaccgggcgttggtgttcctggtgtcggcgtgccgggcgtgggtgttccgggcgtaggtgtcccaggtgtgggcgtaccgggcgttggtgttcctggtgtcggcgtgccgggcgtgggtgttccgggcgtaggtgtcccaggtgtgggcgtaccgggcgttggtgttcctggtgtcggcgtgccgggcgtgggtgttccgggcgtaggtgtcccaggtgtgggcgtaccgggcgttggtgttcctggtgtcggcgtgccgggcgtgggtgttccgggcgtaggtgtcccaggtgtgggcgtaccgggcgttggtgttcctggtgtcggcgtgccgggcgtgggtgttccgggcgtaggtgtcccaggtgtgggcgtaccgggcgttggtgttcctggtgtcggcgtgccgggcgtgggtgttccgggcgtaggtgtcccaggtgtgggcgtaccgggcgttggtgttcctggtgtcggcgtgccgggcgtgggtgttccgggcgtaggtgtcccaggtgtgggcgtaccgggcgttggtgttcctggtgtcggcgtgccgggcgtgggtgttccgggcgtaggtgtcccaggtgtgggcgtaccgggcgttggtgttcctggtgtcggcgtgccgggcgtgggtgttccgggcgtaggtgtcccaggtgtgggcgtaccgggcgttggtgttcctggtgtcggcgtgccgggcgtgggtgttccgggcgtaggtgtcccaggtgtgggcgtaccgggcgttggtgttcctggtgtcggcgtgccgggcgtgggtgttccgggcgtaggtgtcccaggtgtgggcgtaccgggcgttggtgttcctggtgtcggcgtgccgggcgtgggtgttccgggcgtaggtgtcccaggtgtgggcgtaccgggcgttggtgttcctggtgtcggcgtgccgggcgtgggtgttccgggcgtaggtgtcccaggtgtgggcgtaccgggcgttggtgttcctggtgtcggcgtgccgggcgtgggtgttccgggcgtaggtgtcccaggtgtgggcgtaccgggcgttggtgttcctggtgtcggcgtgccgggcgtgggtgttccgggcgtaggtgtcccaggtgtgggcgtaccgggcgttggtgttcctggtgtcggcgtgccgggcggtgggggttcaggagctatagaagatcccgaactagaggcaatcaaggcgcgcgtgagagaaatggaagaggaagccgagaagctgaaagagttgcaaaacgaagtggaaaagcagatgaatatgagtccgccgccaggcaacgccggtccggtcatcatgtctatcgaggaaaagatggaagctgatgcacgctctatctacgtgggtaacgtggattacggcgcgaccgcggaagagctggaagcgcattttcacggttgtggtagcgttaatcgtgttaccattctgtgcgataaattctccggtcacccgaaaggttttgcatatatcgaatttagcgacaaggagagcgttcgtacgagcctggcgctggacgagtccttgtttcgtggtcgtcagattaaagttattccgaaacgtacgaaccgtccgggtattagcaccactgaccgtggcttcccgcgtgcgcgctaccgcgctcgcaccaccaattataactccagccgcagccgtttctacagcggcttcaactcgagacctcgtggccgtgtctatcgtggcggctactgataatgatcttcaggatccgaattcgagctccgtcgacaagcttgcggccgcactcgagcaccaccaccaccaccactgagatccggctgctaacaaagcccgaaaggaagctgagttggctgctgccaccgctgagcaataactagcataaccccttggggcctctaaacgggtcttgaggggttttttgctgaaaggaggaactatatccggat

SEQ ID NO: 113 - DNA, 7323 bp, synthetic construct
  source 1..7323: mol_type = other DNA
tggcgaatgggacgcgccctgtagcggcgcattaagcgcggcgggtgtggtggttacgcgcagcgtgaccgctacacttgccagcgccctagcgcccgctcctttcgctttcttcccttcctttctcgccacgttcgccggctttccccgtcaagctctaaatcgggggctccctttagggttccgatttagtgctttacggcacctcgaccccaaaaaacttgattagggtgatggttcacgtagtgggccatcgccctgatagacggtttttcgccctttgacgttggagtccacgttctttaatagtggactcttgttccaaactggaacaacactcaaccctatctcggtctattcttttgatttataagggattttgccgatttcggcctattggttaaaaaatgagctgatttaacaaaaatttaacgcgaattttaacaaaatattaacgtttacaatttcaggtggcacttttcggggaaatgtgcgcggaacccctatttgtttatttttctaaatacattcaaatatgtatccgctcatgaattaattcttagaaaaactcatcgagcatcaaatgaaactgcaatttattcatatcaggattatcaataccatatttttgaaaaagccgtttctgtaatgaaggagaaaactcaccgaggcagttccataggatggcaagatcctggtatcggtctgcgattccgactcgtccaacatcaatacaacctattaatttcccctcgtcaaaaataaggttatcaagtgagaaatcaccatgagtgacgactgaatccggtgagaatggcaaaagtttatgcatttctttccagacttgttcaacaggccagccattacgctcgtcatcaaaatcactcgcatcaaccaaaccgttattcattcgtgattgcgcctgagcgagacgaaatacgcgatcgctgttaaaaggacaattacaaacaggaatcgaatgcaaccggcgcaggaacactgccagcgcatcaacaatattttcacctgaatcaggatattcttctaatacctggaatgctgttttcccggggatcgcagtggtgagtaaccatgcatcatcaggagtacggataaaatgcttgatggtcggaagaggcataaattccgtcagccagtttagtctgaccatctcatctgtaacatcattggcaacgctacctttgccatgtttcagaaacaactctggcgcatcgggcttcccatacaatcgatagattgtcgcacctgattgcccgacattatcgcgagcccatttatacccatataaatcagcatccatgttggaatttaatcgcggcctagagcaagacgtttcccgttgaatatggctcataacaccccttgtattactgtttatgtaagcagacagttttattgttcatgaccaaaatcccttaacgtgagttttcgttccactgagcgtcagaccccgtagaaaagatcaaaggatcttcttgagatcctttttttctgcgcgtaatctgctgcttgcaaacaaaaaaaccaccgctaccagcggtggtttgtttgccggatcaagagctaccaactctttttccgaaggtaactggcttcagcagagcgcagataccaaatactgtccttctagtgtagccgtagttaggccaccacttcaagaactctgtagcaccgcctacatacctcgctctgctaatcctgttaccagtggctgctgccagtggcgataagtcgtgtcttaccgggttggactcaagacgatagttaccggataaggcgcagcggtcgggctgaacggggggttcgtgcacacagcccagcttggagcgaacgacctacaccgaactgagatacctacagcgtgagctatgagaaagcgccacgcttcccgaagggagaaaggcggacaggtatccggtaagcggcagggtcggaacaggagagcgcacgagggagcttccagggggaaacgcctggtatctttatagtcctgtcgggtttcgccacctctgacttgagcgtcgatttttgtgatgctcgtcaggggggcggagcctatggaaaaacgccagcaacgcggcctttttacggttcctggccttttgctggccttttgctcacatgttctttcctgcgttatcccctgattctgtggataaccgtattaccgcctttgagtgagctgataccgctcgccgcagccgaacgaccgagcgcagcgagtcagtgagcgaggaagcggaagagcgcctgatgcggtattttctccttacgcatctgtgcggtatttcacaccgcatatatggtgcactctcagtacaatctgctctgatgccgcatagttaagccagtatacactccgctatcgctacgtgactgggtcatggctgcgccccgacacccgccaacacccgctgacgcgccctgacgggcttgtctgctcccggcatccgcttacagacaagctgtgaccgtctccgggagctgcatgtgtcagaggttttcaccgtcatcaccgaaacgcgcgaggcagctgcggtaaagctcatcagcgtggtcgtgaagcgattcacagatgtctgcctgttcatccgcgtccagctcgttgagtttctccagaagcgttaatgtctggcttctgataaagcgggccatgttaagggcggttttttcctgtttggtcactgatgcctccgtgtaagggggatttctgttcatgggggtaatgataccgatgaaacgagagaggatgctcacgatacgggttactgatgatgaacatgcccggttactggaacgttgtgagggtaaacaactggcggtatggatgcggcgggaccagagaaaaatcactcagggtcaatgccagcgcttcgttaatacagatgtaggtgttccacagggtagccagcagcatcctgcgatgcagatccggaacataatggtgcagggcgctgacttccgcgtttccagactttacgaaacacggaaaccgaagaccattcatgttgttgctcaggtcgcagacgttttgcagcagcagtcgcttcacgttcgctcgcgtatcggtgattcattctgctaaccagtaaggcaaccccgccagcctagccgggtcctcaacgacaggagcacgatcatgcgcacccgtggggccgccatgccggcgataatggcctgcttctcgccgaaacgtttggtggcgggaccagtgacgaaggcttgagcgagggcgtgcaagattccgaataccgcaagcgacaggccgatcatcgtcgcgctccagcgaaagcggtcctcgccgaaaatgacccagagcgctgccggcacctgtcctacgagttgcatgataaagaagacagtcataagtgcggcgacgatagtcatgccccgcgcccaccggaaggagctgactgggttgaaggctctcaagggcatcggtcgagatcccggtgcctaatgagtgagctaacttacattaattgcgttgcgctcactgcccgctttccagtcgggaaacctgtcgtgccagctgcattaatgaatcggccaacgcgcggggagaggcggtttgcgtattgggcgccagggtggtttttcttttcaccagtgagacgggcaacagctgattgcccttcaccgcctggccctgagagagttgcagcaagcggtccacgctggtttgccccagcaggcgaaaatcctgtttgatggtggttaacggcgggatataacatgagctgtcttcggtatcgtcgtatcccactaccgagatatccgcaccaacgcgcagcccggactcggtaatggcgcgcattgcgcccagcgccatctgatcgttggcaaccagcatcgcagtgggaacgatgccctcattcagcatttgcatggtttgttgaaaaccggacatggcactccagtcgccttcccgttccgctatcggctgaatttgattgcgagtgagatatttatgccagccagccagacgcagacgcgccgagacagaacttaatgggcccgctaacagcgcgatttgctggtgacccaatgcgaccagatgctccacgcccagtcgcgtaccgtcttcatgggagaaaataatactgttgatgggtgtctggtcagagacatcaagaaataacgccggaacattagtgcaggcagcttccacagcaatggcatcctggtcatccagcggatagttaatgatcagcccactgacgcgttgcgcgagaagattgtgcaccgccgctttacaggcttcgacgccgcttcgttctaccatcgacaccaccacgctggcacccagttgatcggcgcgagatttaatcgccgcgacaatttgcgacggcgcgtgcagggccagactggaggtggcaacgccaatcagcaacgactgtttgcccgccagttgttgtgccacgcggttgggaatgtaattcagctccgccatcgccgcttccactttttcccgcgttttcgcagaaacgtggctggcctggttcaccacgcgggaaacggtctgataagagacaccggcatactctgcgacatcgtataacgttactggtttcacattcaccaccctgaattgactctcttccgggcgctatcatgccataccgcgaaaggttttgcgccattcgatggtgtccgggatctcgacgctctcccttatgcgactcctgcattaggaagcagcccagtagtaggttgaggccgttgagcaccgccgccgcaaggaatggtgcatgcaaggagatggcgcccaacagtcccccggccacggggcctgccaccatacccacgccgaaacaagcgctcatgagcccgaagtggcgagcccgatcttccccatcggtgatgtcggcgatataggcgccagcaaccgcacctgtggcgccggtgatgccggccacgatgcgtccggcgtagaggatcgagatctcgatcccgcgaaattaatacgactcactataggggaattgtgagcggataacaattcccctctagaaataattttgtttaactttaagaaggaggagtacatatgagcaaagggccgggcgtgggtgttccgggcgtaggtgtcccaggtgtgggcgtaccgggcgttggtgttcctggtgtcggcgtgccgggcgtgggtgttccgggcgtaggtgtcccaggtgtgggcgtaccgggcgttggtgttcctggtgtcggcgtgccgggcgtgggtgttccgggcgtaggtgtcccaggtgtgggcgtaccgggcgttggtgttcctggtgtcggcgtgccgggcgtgggtgttccgggcgtaggtgtcccaggtgtgggcgtaccgggcgttggtgttcctggtgtcggcgtgccgggcgtgggtgttccgggcgtaggtgtcccaggtgtgggcgtaccgggcgttggtgttcctggtgtcggcgtgccgggcgtgggtgttccgggcgtaggtgtcccaggtgtgggcgtaccgggcgttggtgttcctggtgtcggcgtgccgggcgtgggtgttccgggcgtaggtgtcccaggtgtgggcgtaccgggcgttggtgttcctggtgtcggcgtgccgggcgtgggtgttccgggcgtaggtgtcccaggtgtgggcgtaccgggcgttggtgttcctggtgtcggcgtgccgggcgtgggtgttccgggcgtaggtgtcccaggtgtgggcgtaccgggcgttggtgttcctggtgtcggcgtgccgggcgtgggtgttccgggcgtaggtgtcccaggtgtgggcgtaccgggcgttggtgttcctggtgtcggcgtgccgggcgtgggtgttccgggcgtaggtgtcccaggtgtgggcgtaccgggcgttggtgttcctggtgtcggcgtgccgggcgtgggtgttccgggcgtaggtgtcccaggtgtgggcgtaccgggcgttggtgttcctggtgtcggcgtgccgggcgtgggtgttccgggcgtaggtgtcccaggtgtgggcgtaccgggcgttggtgttcctggtgtcggcgtgccgggcgtgggtgttccgggcgtaggtgtcccaggtgtgggcgtaccgggcgttggtgttcctggtgtcggcgtgccgggcgtgggtgttccgggcgtaggtgtcccaggtgtgggcgtaccgggcgttggtgttcctggtgtcggcgtgccgggcgtgggtgttccgggcgtaggtgtcccaggtgtgggcgtaccgggcgttggtgttcctggtgtcggcgtgccgggcggtgggggttcaggaaattcagtaacatatagtactctaatatccggtctgggcaaggcgggtcgcctggaagaggcgctggaactgttcgaggaaatgaaggagaaaggcatcgtgccaacggttgtgacctacaccacactgatcaacggcctgggtaaagctgggaagcttgacgaagccttggaattgttcgaggaaatgaaagagaagggtctggttccgaatattgttacgtatacttctctgattaacggcctgggtaaggcaggtcgtgtggaagaggcgctggaattatttgatgagatgaaagaaagaggtgttgtgccgaacgtggtgacctttagcaccctaatcagcggttttgcacgtgcaggccgtttggaggaagcgctggaactgttcgaagagatgaaagaaaagggcatcgtgccgagcgttgtaacgtacaccaccctgattgacggtttatgcaaggctggcaagctggacgaggcgctgaaactgttcgaagagatggtagagaagggtatcaaaccgaacgtggtcacctataccaccctgatcgacggcttgggtcgtgctggcaaattagatgaggcgctcaaattgttcgaggaaatggtggagaaaggtatcaagccgaatgttgtcacgtactcgaccctgattgatggtctttgcaaagcgggtaagctggatgaagcgttgaagctgttcgaggaaatggtcgagaagggcattaaaccgaccgttgagttgacttaccgccgtgttgttgaaagctattgtcgtgccaaacgttttgaaggctactgataatgatcttcaggatccgaattcgagctccgtcgacaagcttgcggccgcactcgagcaccaccaccaccaccactgagatccggctgctaacaaagcccgaaaggaagctgagttggctgctgccaccgctgagcaataactagcataaccccttggggcctctaaacgggtcttgaggggttttttgctgaaaggaggaactatatccggat

SEQ ID NO: 114 - DNA, 7572 bp, synthetic construct
  source 1..7572: mol_type = other DNA
tggcgaatgggacgcgccctgtagcggcgcattaagcgcggcgggtgtggtggttacgcgcagcgtgaccgctacacttgccagcgccctagcgcccgctcctttcgctttcttcccttcctttctcgccacgttcgccggctttccccgtcaagctctaaatcgggggctccctttagggttccgatttagtgctttacggcacctcgaccccaaaaaacttgattagggtgatggttcacgtagtgggccatcgccctgatagacggtttttcgccctttgacgttggagtccacgttctttaatagtggactcttgttccaaactggaacaacactcaaccctatctcggtctattcttttgatttataagggattttgccgatttcggcctattggttaaaaaatgagctgatttaacaaaaatttaacgcgaattttaacaaaatattaacgtttacaatttcaggtggcacttttcggggaaatgtgcgcggaacccctatttgtttatttttctaaatacattcaaatatgtatccgctcatgaattaattcttagaaaaactcatcgagcatcaaatgaaactgcaatttattcatatcaggattatcaataccatatttttgaaaaagccgtttctgtaatgaaggagaaaactcaccgaggcagttccataggatggcaagatcctggtatcggtctgcgattccgactcgtccaacatcaatacaacctattaatttcccctcgtcaaaaataaggttatcaagtgagaaatcaccatgagtgacgactgaatccggtgagaatggcaaaagtttatgcatttctttccagacttgttcaacaggccagccattacgctcgtcatcaaaatcactcgcatcaaccaaaccgttattcattcgtgattgcgcctgagcgagacgaaatacgcgatcgctgttaaaaggacaattacaaacaggaatcgaatgcaaccggcgcaggaacactgccagcgcatcaacaatattttcacctgaatcaggatattcttctaatacctggaatgctgttttcccggggatcgcagtggtgagtaaccatgcatcatcaggagtacggataaaatgcttgatggtcggaagaggcataaattccgtcagccagtttagtctgaccatctcatctgtaacatcattggcaacgctacctttgccatgtttcagaaacaactctggcgcatcgggcttcccatacaatcgatagattgtcgcacctgattgcccgacattatcgcgagcccatttatacccatataaatcagcatccatgttggaatttaatcgcggcctagagcaagacgtttcccgttgaatatggctcataacaccccttgtattactgtttatgtaagcagacagttttattgttcatgaccaaaatcccttaacgtgagttttcgttccactgagcgtcagaccccgtagaaaagatcaaaggatcttcttgagatcctttttttctgcgcgtaatctgctgcttgcaaacaaaaaaaccaccgctaccagcggtggtttgtttgccggatcaagagctaccaactctttttccgaaggtaactggcttcagcagagcgcagataccaaatactgtccttctagtgtagccgtagttaggccaccacttcaagaactctgtagcaccgcctacatacctcgctctgctaatcctgttaccagtggctgctgccagtggcgataagtcgtgtcttaccgggttggactcaagacgatagttaccggataaggcgcagcggtcgggctgaacggggggttcgtgcacacagcccagcttggagcgaacgacctacaccgaactgagatacctacagcgtgagctatgagaaagcgccacgcttcccgaagggagaaaggcggacaggtatccggtaagcggcagggtcggaacaggagagcgcacgagggagcttccagggggaaacgcctggtatctttatagtcctgtcgggtttcgccacctctgacttgagcgtcgatttttgtgatgctcgtcaggggggcggagcctatggaaaaacgccagcaacgcggcctttttacggttcctggccttttgctggccttttgctcacatgttctttcctgcgttatcccctgattctgtggataaccgtattaccgcctttgagtgagctgataccgctcgccgcagccgaacgaccgagcgcagcgagtcagtgagcgaggaagcggaagagcgcctgatgcggtattttctccttacgcatctgtgcggtatttcacaccgcatatatggtgcactctcagtacaatctgctctgatgccgcatagttaagccagtatacactccgctatcgctacgtgactgggtcatggctgcgccccgacacccgccaacacccgctgacgcgccctgacgggcttgtctgctcccggcatccgcttacagacaagctgtgaccgtctccgggagctgcatgtgtcagaggttttcaccgtcatcaccgaaacgcgcgaggcagctgcggtaaagctcatcagcgtggtcgtgaagcgattcacagatgtctgcctgttcatccgcgtccagctcgttgagtttctccagaagcgttaatgtctggcttctgataaagcgggccatgttaagggcggttttttcctgtttggtcactgatgcctccgtgtaagggggatttctgttcatgggggtaatgataccgatgaaacgagagaggatgctcacgatacgggttactgatgatgaacatgcccggttactggaacgttgtgagggtaaacaactggcggtatggatgcggcgggaccagagaaaaatcactcagggtcaatgccagcgcttcgttaatacagatgtaggtgttccacagggtagccagcagcatcctgcgatgcagatccggaacataatggtgcagggcgctgacttccgcgtttccagactttacgaaacacggaaaccgaagaccattcatgttgttgctcaggtcgcagacgttttgcagcagcagtcgcttcacgttcgctcgcgtatcggtgattcattctgctaaccagtaaggcaaccccgccagcctagccgggtcctcaacgacaggagcacgatcatgcgcacccgtggggccgccatgccggcgataatggcctgcttctcgccgaaacgtttggtggcgggaccagtgacgaaggcttgagcgagggcgtgcaagattccgaataccgcaagcgacaggccgatcatcgtcgcgctccagcgaaagcggtcctcgccgaaaatgacccagagcgctgccggcacctgtcctacgagttgcatgataaagaagacagtcataagtgcggcgacgatagtcatgccccgcgcccaccggaaggagctgactgggttgaaggctctcaagggcatcggtcgagatcccggtgcctaatgagtgagctaacttacattaattgcgttgcgctcactgcccgctttccagtcgggaaacctgtcgtgccagctgcattaatgaatcggccaacgcgcggggagaggcggtttgcgtattgggcgccagggtggtttttcttttcaccagtgagacgggcaacagctgattgcccttcaccgcctggccctgagagagttgcagcaagcggtccacgctggtttgccccagcaggcgaaaatcctgtttgatggtggttaacggcgggatataacatgagctgtcttcggtatcgtcgtatcccactaccgagatatccgcaccaacgcgcagcccggactcggtaatggcgcgcattgcgcccagcgccatctgatcgttggcaaccagcatcgcagtgggaacgatgccctcattcagcatttgcatggtttgttgaaaaccggacatggcactccagtcgccttcccgttccgctatcggctgaatttgattgcgagtgagatatttatgccagccagccagacgcagacgcgccgagacagaacttaatgggcccgctaacagcgcgatttgctggtgacccaatgcgaccagatgctccacgcccagtcgcgtaccgtcttcatgggagaaaataatactgttgatgggtgtctggtcagagacatcaagaaataacgccggaacattagtgcaggcagcttccacagcaatggcatcctggtcatccagcggatagttaatgatcagcccactgacgcgttgcgcgagaagattgtgcaccgccgctttacaggcttcgacgccgcttcgttctaccatcgacaccaccacgctggcacccagttgatcggcgcgagatttaatcgccgcgacaatttgcgacggcgcgtgcagggccagactggaggtggcaacgccaatcagcaacgactgtttgcccgccagttgttgtgccacgcggttgggaatgtaattcagctccgccatcgccgcttccactttttcccgcgttttcgcagaaacgtggctggcctggttcaccacgcgggaaacggtctgataagagacaccggcatactctgcgacatcgtataacgttactggtttcacattcaccaccctgaattgactctcttccgggcgctatcatgccataccgcgaaaggttttgcgccattcgatggtgtccgggatctcgacgctctcccttatgcgactcctgcattaggaagcagcccagtagtaggttgaggccgttgagcaccgccgccgcaaggaatggtgcatgcaaggagatggcgcccaacagtcccccggccacggggcctgccaccatacccacgccgaaacaagcgctcatgagcccgaagtggcgagcccgatcttccccatcggtgatgtcggcgatataggcgccagcaaccgcacctgtggcgccggtgatgccggccacgatgcgtccggcgtagaggatcgagatctcgatcccgcgaaattaatacgactcactataggggaattgtgagcggataacaattcccctctagaaataattttgtttaactttaagaaggaggagtacatatgagcaaagggccgggcgtgggtgttccgggcgtaggtgtcccaggtgtgggcgtaccgggcgttggtgttcctggtgtcggcgtgccgggcgtgggtgttccgggcgtaggtgtcccaggtgtgggcgtaccgggcgttggtgttcctggtgtcggcgtgccgggcgtgggtgttccgggcgtaggtgtcccaggtgtgggcgtaccgggcgttggtgttcctggtgtcggcgtgccgggcgtgggtgttccgggcgtaggtgtcccaggtgtgggcgtaccgggcgttggtgttcctggtgtcggcgtgccgggcgtgggtgttccgggcgtaggtgtcccaggtgtgggcgtaccgggcgttggtgttcctggtgtcggcgtgccgggcgtgggtgttccgggcgtaggtgtcccaggtgtgggcgtaccgggcgttggtgttcctggtgtcggcgtgccgggcgtgggtgttccgggcgtaggtgtcccaggtgtgggcgtaccgggcgttggtgttcctggtgtcggcgtgccgggcgtgggtgttccgggcgtaggtgtcccaggtgtgggcgtaccgggcgttggtgttcctggtgtcggcgtgccgggcgtgggtgttccgggcgtaggtgtcccaggtgtgggcgtaccgggcgttggtgttcctggtgtcggcgtgccgggcgtgggtgttccgggcgtaggtgtcccaggtgtgggcgtaccgggcgttggtgttcctggtgtcggcgtgccgggcgtgggtgttccgggcgtaggtgtcccaggtgtgggcgtaccgggcgttggtgttcctggtgtcggcgtgccgggcgtgggtgttccgggcgtaggtgtcccaggtgtgggcgtaccgggcgttggtgttcctggtgtcggcgtgccgggcgtgggtgttccgggcgtaggtgtcccaggtgtgggcgtaccgggcgttggtgttcctggtgtcggcgtgccgggcgtgggtgttccgggcgtaggtgtcccaggtgtgggcgtaccgggcgttggtgttcctggtgtcggcgtgccgggcgtgggtgttccgggcgtaggtgtcccaggtgtgggcgtaccgggcgttggtgttcctggtgtcggcgtgccgggcgtgggtgttccgggcgtaggtgtcccaggtgtgggcgtaccgggcgttggtgttcctggtgtcggcgtgccgggcggtgggggttcaggccgttcccgccttcttgaggattttcgtaataaccgttaccctaatttacagttacgtgaaattgcgggacacattatggagttctctcaggatcaacacggctcccgtttcatccaactgaaattggaacgtgcgacaccggctgaacgtcagttggtgttcaatgagattttacaggcagcttaccagttgatggttgatgttttcggggtcttcgtaatccagaaattctttgagttcgggtcgttagagcaaaagttggctttagcggagcgcattcgtggccatgttttgtcgttggctttgcagatgtatggtacacgtgtcatccaaaaagcacttgagttcattccatccgaccaacagaacgagatggttcgtgagttagatggccatgtactgaaatgcgtgaaggaccagaatggccgcggagtggtctacaaatgcatcgagtgtgtccagccccagtcattgcaattcatcattgatgcatttaagggtcaagtttttgccttgtccactcatccctatggtccacacgtcatccaacgtattttagagcattgcctgcccgaccagacattgccaatcttagaagaactgcatcaacacaccgaacaactggtgcaggatcagtatggggtgtgggtcattcatcatgtgcttgaacatggacgtccagaagacaagtccaagattgtggccgagatccgtgggaacgtattagttctgagccaacacaaattcgcaatgcacgtagtgcagaaatgtgtaacccatgccagtcgcactgaacgcgctgtattgatcgatgaggtttgcaccatgaatgatgggccccatagtgccttatacacgatgatgaaagaccaatatgctcaattggtggtgcgtaagatgattgacgtcgcggagcctggccaacgtaaaatcgttatgcataaaatccgcccccacatcgcaactttgcgtaagtatacatacggaaaacacatcttggccaagttagaaaaatactatatgaaaaacggggtagatttagggggctactgataatgatcttcaggatccgaattcgagctccgtcgacaagcttgcggccgcactcgagcaccaccaccaccaccactgagatccggctgctaacaaagcccgaaaggaagctgagttggctgctgccaccgctgagcaataactagcataaccccttggggcctctaaacgggtcttgaggggttttttgctgaaaggaggaactatatccggat

SEQ ID NO: 115 - DNA, 6729 bp, synthetic construct
  source 1..6729: mol_type = other DNA
tggcgaatgggacgcgccctgtagcggcgcattaagcgcggcgggtgtggtggttacgcgcagcgtgaccgctacacttgccagcgccctagcgcccgctcctttcgctttcttcccttcctttctcgccacgttcgccggctttccccgtcaagctctaaatcgggggctccctttagggttccgatttagtgctttacggcacctcgaccccaaaaaacttgattagggtgatggttcacgtagtgggccatcgccctgatagacggtttttcgccctttgacgttggagtccacgttctttaatagtggactcttgttccaaactggaacaacactcaaccctatctcggtctattcttttgatttataagggattttgccgatttcggcctattggttaaaaaatgagctgatttaacaaaaatttaacgcgaattttaacaaaatattaacgtttacaatttcaggtggcacttttcggggaaatgtgcgcggaacccctatttgtttatttttctaaatacattcaaatatgtatccgctcatgaattaattcttagaaaaactcatcgagcatcaaatgaaactgcaatttattcatatcaggattatcaataccatatttttgaaaaagccgtttctgtaatgaaggagaaaactcaccgaggcagttccataggatggcaagatcctggtatcggtctgcgattccgactcgtccaacatcaatacaacctattaatttcccctcgtcaaaaataaggttatcaagtgagaaatcaccatgagtgacgactgaatccggtgagaatggcaaaagtttatgcatttctttccagacttgttcaacaggccagccattacgctcgtcatcaaaatcactcgcatcaaccaaaccgttattcattcgtgattgcgcctgagcgagacgaaatacgcgatcgctgttaaaaggacaattacaaacaggaatcgaatgcaaccggcgcaggaacactgccagcgcatcaacaatattttcacctgaatcaggatattcttctaatacctggaatgctgttttcccggggatcgcagtggtgagtaaccatgcatcatcaggagtacggataaaatgcttgatggtcggaagaggcataaattccgtcagccagtttagtctgaccatctcatctgtaacatcattggcaacgctacctttgccatgtttcagaaacaactctggcgcatcgggcttcccatacaatcgatagattgtcgcacctgattgcccgacattatcgcgagcccatttatacccatataaatcagcatccatgttggaatttaatcgcggcctagagcaagacgtttcccgttgaatatggctcataacaccccttgtattactgtttatgtaagcagacagttttattgttcatgaccaaaatcccttaacgtgagttttcgttccactgagcgtcagaccccgtagaaaagatcaaaggatcttcttgagatcctttttttctgcgcgtaatctgctgcttgcaaacaaaaaaaccaccgctaccagcggtggtttgtttgccggatcaagagctaccaactctttttccgaaggtaactggcttcagcagagcgcagataccaaatactgtccttctagtgtagccgtagttaggccaccacttcaagaactctgtagcaccgcctacatacctcgctctgctaatcctgttaccagtggctgctgccagtggcgataagtcgtgtcttaccgggttggactcaagacgatagttaccggataaggcgcagcggtcgggctgaacggggggttcgtgcacacagcccagcttggagcgaacgacctacaccgaactgagatacctacagcgtgagctatgagaaagcgccacgcttcccgaagggagaaaggcggacaggtatccggtaagcggcagggtcggaacaggagagcgcacgagggagcttccagggggaaacgcctggtatctttatagtcctgtcgggtttcgccacctctgacttgagcgtcgatttttgtgatgctcgtcaggggggcggagcctatggaaaaacgccagcaacgcggcctttttacggttcctggccttttgctggccttttgctcacatgttctttcctgcgttatcccctgattctgtggataaccgtattaccgcctttgagtgagctgataccgctcgccgcagccgaacgaccgagcgcagcgagtcagtgagcgaggaagcggaagagcgcctgatgcggtattttctccttacgcatctgtgcggtatttcacaccgcatatatggtgcactctcagtacaatctgctctgatgccgcatagttaagccagtatacactccgctatcgctacgtgactgggtcatggctgcgccccgacacccgccaacacccgctgacgcgccctgacgggcttgtctgctcccggcatccgcttacagacaagctgtgaccgtctccgggagctgcatgtgtcagaggttttcaccgtcatcaccgaaacgcgcgaggcagctgcggtaaagctcatcagcgtggtcgtgaagcgattcacagatgtctgcctgttcatccgcgtccagctcgttgagtttctccagaagcgttaatgtctggcttctgataaagcgggccatgttaagggcggttttttcctgtttggtcactgatgcctccgtgtaagggggatttctgttcatgggggtaatgataccgatgaaacgagagaggatgctcacgatacgggttactgatgatgaacatgcccggttactggaacgttgtgagggtaaacaactggcggtatggatgcggcgggaccagagaaaaatcactcagggtcaatgccagcgcttcgttaatacagatgtaggtgttccacagggtagccagcagcatcctgcgatgcagatccggaacataatggtgcagggcgctgacttccgcgtttccagactttacgaaacacggaaaccgaagaccattcatgttgttgctcaggtcgcagacgttttgcagcagcagtcgcttcacgttcgctcgcgtatcggtgattcattctgctaaccagtaaggcaaccccgccagcctagccgggtcctcaacgacaggagcacgatcatgcgcacccgtggggccgccatgccggcgataatggcctgcttctcgccgaaacgtttggtggcgggaccagtgacgaaggcttgagcgagggcgtgcaagattccgaataccgcaagcgacaggccgatcatcgtcgcgctccagcgaaagcggtcctcgccgaaaatgacccagagcgctgccggcacctgtcctacgagttgcatgataaagaagacagtcataagtgcggcgacgatagtcatgccccgcgcccaccggaaggagctgactgggttgaaggctctcaagggcatcggtcgagatcccggtgcctaatgagtgagctaacttacattaattgcgttgcgctcactgcccgctttccagtcgggaaacctgtcgtgccagctgcattaatgaatcggccaacgcgcggggagaggcggtttgcgtattgggcgccagggtggtttttcttttcaccagtgagacgggcaacagctgattgcccttcaccgcctggccctgagagagttgcagcaagcggtccacgctggtttgccccagcaggcgaaaatcctgtttgatggtggttaacggcgggatataacatgagctgtcttcggtatcgtcgtatcccactaccgagatatccgcaccaacgcgcagcccggactcggtaatggcgcgcattgcgcccagcgccatctgatcgttggcaaccagcatcgcagtgggaacgatgccctcattcagcatttgcatggtttgttgaaaaccggacatggcactccagtcgccttcccgttccgctatcggctgaatttgattgcgagtgagatatttatgccagccagccagacgcagacgcgccgagacagaacttaatgggcccgctaacagcgcgatttgctggtgacccaatgcgaccagatgctccacgcccagtcgcgtaccgtcttcatgggagaaaataatactgttgatgggtgtctggtcagagacatcaagaaataacgccggaacattagtgcaggcagcttccacagcaatggcatcctggtcatccagcggatagttaatgatcagcccactgacgcgttgcgcgagaagattgtgcaccgccgctttacaggcttcgacgccgcttcgttctaccatcgacaccaccacgctggcacccagttgatcggcgcgagatttaatcgccgcgacaatttgcgacggcgcgtgcagggccagactggaggtggcaacgccaatcagcaacgactgtttgcccgccagttgttgtgccacgcggttgggaatgtaattcagctccgccatcgccgcttccactttttcccgcgttttcgcagaaacgtggctggcctggttcaccacgcgggaaacggtctgataagagacaccggcatactctgcgacatcgtataacgttactggtttcacattcaccaccctgaattgactctcttccgggcgctatcatgccataccgcgaaaggttttgcgccattcgatggtgtccgggatctcgacgctctcccttatgcgactcctgcattaggaagcagcccagtagtaggttgaggccgttgagcaccgccgccgcaaggaatggtgcatgcaaggagatggcgcccaacagtcccccggccacggggcctgccaccatacccacgccgaaacaagcgctcatgagcccgaagtggcgagcccgatcttccccatcggtgatgtcggcgatataggcgccagcaaccgcacctgtggcgccggtgatgccggccacgatgcgtccggcgtagaggatcgagatctcgatcccgcgaaattaatacgactcactataggggaattgtgagcggataacaattcccctctagaaataattttgtttaactttaagaaggaggagtacatatgagcaaagggccgggcgtgggtgttccgggcgtaggtgtcccaggtgtgggcgtaccgggcgttggtgttcctggtgtcggcgtgccgggcgtgggtgttccgggcgtaggtgtcccaggtgtgggcgtaccgggcgttggtgttcctggtgtcggcgtgccgggcgtgggtgttccgggcgtaggtgtcccaggtgtgggcgtaccgggcgttggtgttcctggtgtcggcgtgccgggcgtgggtgttccgggcgtaggtgtcccaggtgtgggcgtaccgggcgttggtgttcctggtgtcggcgtgccgggcgtgggtgttccgggcgtaggtgtcccaggtgtgggcgtaccgggcgttggtgttcctggtgtcggcgtgccgggcgtgggtgttccgggcgtaggtgtcccaggtgtgggcgtaccgggcgttggtgttcctggtgtcggcgtgccgggcgtgggtgttccgggcgtaggtgtcccaggtgtgggcgtaccgggcgttggtgttcctggtgtcggcgtgccgggcgtgggtgttccgggcgtaggtgtcccaggtgtgggcgtaccgggcgttggtgttcctggtgtcggcgtgccgggcgtgggtgttccgggcgtaggtgtcccaggtgtgggcgtaccgggcgttggtgttcctggtgtcggcgtgccgggcgtgggtgttccgggcgtaggtgtcccaggtgtgggcgtaccgggcgttggtgttcctggtgtcggcgtgccgggcgtgggtgttccgggcgtaggtgtcccaggtgtgggcgtaccgggcgttggtgttcctggtgtcggcgtgccgggcgtgggtgttccgggcgtaggtgtcccaggtgtgggcgtaccgggcgttggtgttcctggtgtcggcgtgccgggcgtgggtgttccgggcgtaggtgtcccaggtgtgggcgtaccgggcgttggtgttcctggtgtcggcgtgccgggcgtgggtgttccgggcgtaggtgtcccaggtgtgggcgtaccgggcgttggtgttcctggtgtcggcgtgccgggcgtgggtgttccgggcgtaggtgtcccaggtgtgggcgtaccgggcgttggtgttcctggtgtcggcgtgccgggcgtgggtgttccgggcgtaggtgtcccaggtgtgggcgtaccgggcgttggtgttcctggtgtcggcgtgccgggcgacaagaaatcacccatttcgcaggtacatgagatcggaattaaacgtaacatgacagtccactttaaggtgttacgcgaggaaggaccggctcacatgaagaacttcatcaccgcttgcatcgtaggttcaattgtaaccgagggtgaggggaacggaaagaaagtcagtaagaaacgtgcggctgagaagatgcttgtagagcttcaaaagttaggctactgataatgatcttcaggatccgaattcgagctccgtcgacaagcttgcggccgcactcgagcaccaccaccaccaccactgagatccggctgctaacaaagcccgaaaggaagctgagttggctgctgccaccgctgagcaataactagcataaccccttggggcctctaaacgggtcttgaggggttttttgctgaaaggaggaactatatccggat

SEQ ID NO: 116 - DNA, 6732 bp, synthetic construct
  source 1..6732: mol_type = other DNA
tggcgaatgggacgcgccctgtagcggcgcattaagcgcggcgggtgtggtggttacgcgcagcgtgaccgctacacttgccagcgccctagcgcccgctcctttcgctttcttcccttcctttctcgccacgttcgccggctttccccgtcaagctctaaatcgggggctccctttagggttccgatttagtgctttacggcacctcgaccccaaaaaacttgattagggtgatggttcacgtagtgggccatcgccctgatagacggtttttcgccctttgacgttggagtccacgttctttaatagtggactcttgttccaaactggaacaacactcaaccctatctcggtctattcttttgatttataagggattttgccgatttcggcctattggttaaaaaatgagctgatttaacaaaaatttaacgcgaattttaacaaaatattaacgtttacaatttcaggtggcacttttcggggaaatgtgcgcggaacccctatttgtttatttttctaaatacattcaaatatgtatccgctcatgaattaattcttagaaaaactcatcgagcatcaaatgaaactgcaatttattcatatcaggattatcaataccatatttttgaaaaagccgtttctgtaatgaaggagaaaactcaccgaggcagttccataggatggcaagatcctggtatcggtctgcgattccgactcgtccaacatcaatacaacctattaatttcccctcgtcaaaaataaggttatcaagtgagaaatcaccatgagtgacgactgaatccggtgagaatggcaaaagtttatgcatttctttccagacttgttcaacaggccagccattacgctcgtcatcaaaatcactcgcatcaaccaaaccgttattcattcgtgattgcgcctgagcgagacgaaatacgcgatcgctgttaaaaggacaattacaaacaggaatcgaatgcaaccggcgcaggaacactgccagcgcatcaacaatattttcacctgaatcaggatattcttctaatacctggaatgctgttttcccggggatcgcagtggtgagtaaccatgcatcatcaggagtacggataaaatgcttgatggtcggaagaggcataaattccgtcagccagtttagtctgaccatctcatctgtaacatcattggcaacgctacctttgccatgtttcagaaacaactctggcgcatcgggcttcccatacaatcgatagattgtcgcacctgattgcccgacattatcgcgagcccatttatacccatataaatcagcatccatgttggaatttaatcgcggcctagagcaagacgtttcccgttgaatatggctcataacaccccttgtattactgtttatgtaagcagacagttttattgttcatgaccaaaatcccttaacgtgagttttcgttccactgagcgtcagaccccgtagaaaagatcaaaggatcttcttgagatcctttttttctgcgcgtaatctgctgcttgcaaacaaaaaaaccaccgctaccagcggtggtttgtttgccggatcaagagctaccaactctttttccgaaggtaactggcttcagcagagcgcagataccaaatactgtccttctagtgtagccgtagttaggccaccacttcaagaactctgtagcaccgcctacatacctcgctctgctaatcctgttaccagtggctgctgccagtggcgataagtcgtgtcttaccgggttggactcaagacgatagttaccggataaggcgcagcggtcgggctgaacggggggttcgtgcacacagcccagcttggagcgaacgacctacaccgaactgagatacctacagcgtgagctatgagaaagcgccacgcttcccgaagggagaaaggcggacaggtatccggtaagcggcagggtcggaacaggagagcgcacgagggagcttccagggggaaacgcctggtatctttatagtcctgtcgggtttcgccacctctgacttgagcgtcgatttttgtgatgctcgtcaggggggcggagcctatggaaaaacgccagcaacgcggcctttttacggttcctggccttttgctggccttttgctcacatgttctttcctgcgttatcccctgattctgtggataaccgtattaccgcctttgagtgagctgataccgctcgccgcagccgaacgaccgagcgcagcgagtcagtgagcgaggaagcggaagagcgcctgatgcggtattttctccttacgcatctgtgcggtatttcacaccgcatatatggtgcactctcagtacaatctgctctgatgccgcatagttaagccagtatacactccgctatcgctacgtgactgggtcatggctgcgccccgacacccgccaacacccgctgacgcgccctgacgggcttgtctgctcccggcatccgcttacagacaagctgtgaccgtctccgggagctgcatgtgtcagaggttttcaccgtcatcaccgaaacgcgcgaggcagctgcggtaaagctcatcagcgtggtcgtgaagcgattcacagatgtctgcctgttcatccgcgtccagctcgttgagtttctccagaagcgttaatgtctggcttctgataaagcgggccatgttaagggcggttttttcctgtttggtcactgatgcctccgtgtaagggggatttctgttcatgggggtaatgataccgatgaaacgagagaggatgctcacgatacgggttactgatgatgaacatgcccggttactggaacgttgtgagggtaaacaactggcggtatggatgcggcgggaccagagaaaaatcactcagggtcaatgccagcgcttcgttaatacagatgtaggtgttccacagggtagccagcagcatcctgcgatgcagatccggaacataatggtgcagggcgctgacttccgcgtttccagactttacgaaacacggaaaccgaagaccattcatgttgttgctcaggtcgcagacgttttgcagcagcagtcgcttcacgttcgctcgcgtatcggtgattcattctgctaaccagtaaggcaaccccgccagcctagccgggtcctcaacgacaggagcacgatcatgcgcacccgtggggccgccatgccggcgataatggcctgcttctcgccgaaacgtttggtggcgggaccagtgacgaaggcttgagcgagggcgtgcaagattccgaataccgcaagcgacaggccgatcatcgtcgcgctccagcgaaagcggtcctcgccgaaaatgacccagagcgctgccggcacctgtcctacgagttgcatgataaagaagacagtcataagtgcggcgacgatagtcatgccccgcgcccaccggaaggagctgactgggttgaaggctctcaagggcatcggtcgagatcccggtgcctaatgagtgagctaacttacattaattgcgttgcgctcactgcccgctttccagtcgggaaacctgtcgtgccagctgcattaatgaatcggccaacgcgcggggagaggcggtttgcgtattgggcgccagggtggtttttcttttcaccagtgagacgggcaacagctgattgcccttcaccgcctggccctgagagagttgcagcaagcggtccacgctggtttgccccagcaggcgaaaatcctgtttgatggtggttaacggcgggatataacatgagctgtcttcggtatcgtcgtatcccactaccgagatatccgcaccaacgcgcagcccggactcggtaatggcgcgcattgcgcccagcgccatctgatcgttggcaaccagcatcgcagtgggaacgatgccctcattcagcatttgcatggtttgttgaaaaccggacatggcactccagtcgccttcccgttccgctatcggctgaatttgattgcgagtgagatatttatgccagccagccagacgcagacgcgccgagacagaacttaatgggcccgctaacagcgcgatttgctggtgacccaatgcgaccagatgctccacgcccagtcgcgtaccgtcttcatgggagaaaataatactgttgatgggtgtctggtcagagacatcaagaaataacgccggaacattagtgcaggcagcttccacagcaatggcatcctggtcatccagcggatagttaatgatcagcccactgacgcgttgcgcgagaagattgtgcaccgccgctttacaggcttcgacgccgcttcgttctaccatcgacaccaccacgctggcacccagttgatcggcgcgagatttaatcgccgcgacaatttgcgacggcgcgtgcagggccagactggaggtggcaacgccaatcagcaacgactgtttgcccgccagttgttgtgccacgcggttgggaatgtaattcagctccgccatcgccgcttccactttttcccgcgttttcgcagaaacgtggctggcctggttcaccacgcgggaaacggtctgataagagacaccggcatactctgcgacatcgtataacgttactggtttcacattcaccaccctgaattgactctcttccgggcgctatcatgccataccgcgaaaggttttgcgccattcgatggtgtccgggatctcgacgctctcccttatgcgactcctgcattaggaagcagcccagtagtaggttgaggccgttgagcaccgccgccgcaaggaatggtgcatgcaaggagatggcgcccaacagtcccccggccacggggcctgccaccatacccacgccgaaacaagcgctcatgagcccgaagtggcgagcccgatcttccccatcggtgatgtcggcgatataggcgccagcaaccgcacctgtggcgccggtgatgccggccacgatgcgtccggcgtagaggatcgagatctcgatcccgcgaaattaatacgactcactataggggaattgtgagcggataacaattcccctctagaaataattttgtttaactttaagaaggaggagtacatatgagcaaagggccgggaggcgtgggtgttccgggcgtaggtgtcccaggtgtgggcgtaccgggcgttggtgttcctggtgtcggcgtgccgggcgtgggtgttccgggcgtaggtgtcccaggtgtgggcgtaccgggcgttggtgttcctggtgtcggcgtgccgggcgtgggtgttccgggcgtaggtgtcccaggtgtgggcgtaccgggcgttggtgttcctggtgtcggcgtgccgggcgtgggtgttccgggcgtaggtgtcccaggtgtgggcgtaccgggcgttggtgttcctggtgtcggcgtgccgggcgtgggtgttccgggcgtaggtgtcccaggtgtgggcgtaccgggcgttggtgttcctggtgtcggcgtgccgggcgtgggtgttccgggcgtaggtgtcccaggtgtgggcgtaccgggcgttggtgttcctggtgtcggcgtgccgggcgtgggtgttccgggcgtaggtgtcccaggtgtgggcgtaccgggcgttggtgttcctggtgtcggcgtgccgggcgtgggtgttccgggcgtaggtgtcccaggtgtgggcgtaccgggcgttggtgttcctggtgtcggcgtgccgggcgtgggtgttccgggcgtaggtgtcccaggtgtgggcgtaccgggcgttggtgttcctggtgtcggcgtgccgggcgtgggtgttccgggcgtaggtgtcccaggtgtgggcgtaccgggcgttggtgttcctggtgtcggcgtgccgggcgtgggtgttccgggcgtaggtgtcccaggtgtgggcgtaccgggcgttggtgttcctggtgtcggcgtgccgggcgtgggtgttccgggcgtaggtgtcccaggtgtgggcgtaccgggcgttggtgttcctggtgtcggcgtgccgggcgtgggtgttccgggcgtaggtgtcccaggtgtgggcgtaccgggcgttggtgttcctggtgtcggcgtgccgggcgtgggtgttccgggcgtaggtgtcccaggtgtgggcgtaccgggcgttggtgttcctggtgtcggcgtgccgggcgtgggtgttccgggcgtaggtgtcccaggtgtgggcgtaccgggcgttggtgttcctggtgtcggcgtgccgggcgtgggtgttccgggcgtaggtgtcccaggtgtgggcgtaccgggcgttggtgttcctggtgtcggcgtgccgggctacggtgggggttcagcttcaggtagcacccgctataaaaccgaactgtgccgcccgtttgaagaaagcggcacgtgcaaatacggcgagaaatgccagttcgcccatggcttccatgaactgcgcagtctgacgcgccatccgaagtacaaaaccgagctgtgccgcaccttccataccatcggcttttgtccgtacggcccgcgctgccacttcatccataatgcggatgaatgataatgaggatccgagctccgtcgacaagcttgcggccgcactcgagcaccaccaccaccaccactgagatccggctgctaacaaagcccgaaaggaagctgagttggctgctgccaccgctgagcaataactagcataaccccttggggcctctaaacgggtcttgaggggttttttgctgaaaggaggaactatatccggat

SEQ ID NO: 117 - DNA, 6708 bp, synthetic construct
  source 1..6708: mol_type = other DNA
tggcgaatgggacgcgccctgtagcggcgcattaagcgcggcgggtgtggtggttacgcgcagcgtgaccgctacacttgccagcgccctagcgcccgctcctttcgctttcttcccttcctttctcgccacgttcgccggctttccccgtcaagctctaaatcgggggctccctttagggttccgatttagtgctttacggcacctcgaccccaaaaaacttgattagggtgatggttcacgtagtgggccatcgccctgatagacggtttttcgccctttgacgttggagtccacgttctttaatagtggactcttgttccaaactggaacaacactcaaccctatctcggtctattcttttgatttataagggattttgccgatttcggcctattggttaaaaaatgagctgatttaacaaaaatttaacgcgaattttaacaaaatattaacgtttacaatttcaggtggcacttttcggggaaatgtgcgcggaacccctatttgtttatttttctaaatacattcaaatatgtatccgctcatgaattaattcttagaaaaactcatcgagcatcaaatgaaactgcaatttattcatatcaggattatcaataccatatttttgaaaaagccgtttctgtaatgaaggagaaaactcaccgaggcagttccataggatggcaagatcctggtatcggtctgcgattccgactcgtccaacatcaatacaacctattaatttcccctcgtcaaaaataaggttatcaagtgagaaatcaccatgagtgacgactgaatccggtgagaatggcaaaagtttatgcatttctttccagacttgttcaacaggccagccattacgctcgtcatcaaaatcactcgcatcaaccaaaccgttattcattcgtgattgcgcctgagcgagacgaaatacgcgatcgctgttaaaaggacaattacaaacaggaatcgaatgcaaccggcgcaggaacactgccagcgcatcaacaatattttcacctgaatcaggatattcttctaatacctggaatgctgttttcccggggatcgcagtggtgagtaaccatgcatcatcaggagtacggataaaatgcttgatggtcggaagaggcataaattccgtcagccagtttagtctgaccatctcatctgtaacatcattggcaacgctacctttgccatgtttcagaaacaactctggcgcatcgggcttcccatacaatcgatagattgtcgcacctgattgcccgacattatcgcgagcccatttatacccatataaatcagcatccatgttggaatttaatcgcggcctagagcaagacgtttcccgttgaatatggctcataacaccccttgtattactgtttatgtaagcagacagttttattgttcatgaccaaaatcccttaacgtgagttttcgttccactgagcgtcagaccccgtagaaaagatcaaaggatcttcttgagatcctttttttctgcgcgtaatctgctgcttgcaaacaaaaaaaccaccgctaccagcggtggtttgtttgccggatcaagagctaccaactctttttccgaaggtaactggcttcagcagagcgcagataccaaatactgtccttctagtgtagccgtagttaggccaccacttcaagaactctgtagcaccgcctacatacctcgctctgctaatcctgttaccagtggctgctgccagtggcgataagtcgtgtcttaccgggttggactcaagacgatagttaccggataaggcgcagcggtcgggctgaacggggggttcgtgcacacagcccagcttggagcgaacgacctacaccgaactgagatacctacagcgtgagctatgagaaagcgccacgcttcccgaagggagaaaggcggacaggtatccggtaagcggcagggtcggaacaggagagcgcacgagggagcttccagggggaaacgcctggtatctttatagtcctgtcgggtttcgccacctctgacttgagcgtcgatttttgtgatgctcgtcaggggggcggagcctatggaaaaacgccagcaacgcggcctttttacggttcctggccttttgctggccttttgctcacatgttctttcctgcgttatcccctgattctgtggataaccgtattaccgcctttgagtgagctgataccgctcgccgcagccgaacgaccgagcgcagcgagtcagtgagcgaggaagcggaagagcgcctgatgcggtattttctccttacgcatctgtgcggtatttcacaccgcatatatggtgcactctcagtacaatctgctctgatgccgcatagttaagccagtatacactccgctatcgctacgtgactgggtcatggctgcgccccgacacccgccaacacccgctgacgcgccctgacgggcttgtctgctcccggcatccgcttacagacaagctgtgaccgtctccgggagctgcatgtgtcagaggttttcaccgtcatcaccgaaacgcgcgaggcagctgcggtaaagctcatcagcgtggtcgtgaagcgattcacagatgtctgcctgttcatccgcgtccagctcgttgagtttctccagaagcgttaatgtctggcttctgataaagcgggccatgttaagggcggttttttcctgtttggtcactgatgcctccgtgtaagggggatttctgttcatgggggtaatgataccgatgaaacgagagaggatgctcacgatacgggttactgatgatgaacatgcccggttactggaacgttgtgagggtaaacaactggcggtatggatgcggcgggaccagagaaaaatcactcagggtcaatgccagcgcttcgttaatacagatgtaggtgttccacagggtagccagcagcatcctgcgatgcagatccggaacataatggtgcagggcgctgacttccgcgtttccagactttacgaaacacggaaaccgaagaccattcatgttgttgctcaggtcgcagacgttttgcagcagcagtcgcttcacgttcgctcgcgtatcggtgattcattctgctaaccagtaaggcaaccccgccagcctagccgggtcctcaacgacaggagcacgatcatgcgcacccgtggggccgccatgccggcgataatggcctgcttctcgccgaaacgtttggtggcgggaccagtgacgaaggcttgagcgagggcgtgcaagattccgaataccgcaagcgacaggccgatcatcgtcgcgctccagcgaaagcggtcctcgccgaaaatgacccagagcgctgccggcacctgtcctacgagttgcatgataaagaagacagtcataagtgcggcgacgatagtcatgccccgcgcccaccggaaggagctgactgggttgaaggctctcaagggcatcggtcgagatcccggtgcctaatgagtgagctaacttacattaattgcgttgcgctcactgcccgctttccagtcgggaaacctgtcgtgccagctgcattaatgaatcggccaacgcgcggggagaggcggtttgcgtattgggcgccagggtggtttttcttttcaccagtgagacgggcaacagctgattgcccttcaccgcctggccctgagagagttgcagcaagcggtccacgctggtttgccccagcaggcgaaaatcctgtttgatggtggttaacggcgggatataacatgagctgtcttcggtatcgtcgtatcccactaccgagatatccgcaccaacgcgcagcccggactcggtaatggcgcgcattgcgcccagcgccatctgatcgttggcaaccagcatcgcagtgggaacgatgccctcattcagcatttgcatggtttgttgaaaaccggacatggcactccagtcgccttcccgttccgctatcggctgaatttgattgcgagtgagatatttatgccagccagccagacgcagacgcgccgagacagaacttaatgggcccgctaacagcgcgatttgctggtgacccaatgcgaccagatgctccacgcccagtcgcgtaccgtcttcatgggagaaaataatactgttgatgggtgtctggtcagagacatcaagaaataacgccggaacattagtgcaggcagcttccacagcaatggcatcctggtcatccagcggatagttaatgatcagcccactgacgcgttgcgcgagaagattgtgcaccgccgctttacaggcttcgacgccgcttcgttctaccatcgacaccaccacgctggcacccagttgatcggcgcgagatttaatcgccgcgacaatttgcgacggcgcgtgcagggccagactggaggtggcaacgccaatcagcaacgactgtttgcccgccagttgttgtgccacgcggttgggaatgtaattcagctccgccatcgccgcttccactttttcccgcgttttcgcagaaacgtggctggcctggttcaccacgcgggaaacggtctgataagagacaccggcatactctgcgacatcgtataacgttactggtttcacattcaccaccctgaattgactctcttccgggcgctatcatgccataccgcgaaaggttttgcgccattcgatggtgtccgggatctcgacgctctcccttatgcgactcctgcattaggaagcagcccagtagtaggttgaggccgttgagcaccgccgccgcaaggaatggtgcatgcaaggagatggcgcccaacagtcccccggccacggggcctgccaccatacccacgccgaaacaagcgctcatgagcccgaagtggcgagcccgatcttccccatcggtgatgtcggcgatataggcgccagcaaccgcacctgtggcgccggtgatgccggccacgatgcgtccggcgtagaggatcgagatctcgatcccgcgaaattaatacgactcactataggggaattgtgagcggataacaattcccctctagaaataattttgtttaactttaagaaggaggagtacatatgggcgtgggtgttccgggcgtaggtgtcccaggtgtgggcgtaccgggcgttggtgttcctggtgtcggcgtgccgggcgtgggtgttccgggcgtaggtgtcccaggtgtgggcgtaccgggcgttggtgttcctggtgtcggcgtgccgggcgtgggtgttccgggcgtaggtgtcccaggtgtgggcgtaccgggcgttggtgttcctggtgtcggcgtgccgggcgtgggtgttccgggcgtaggtgtcccaggtgtgggcgtaccgggcgttggtgttcctggtgtcggcgtgccgggcgtgggtgttccgggcgtaggtgtcccaggtgtgggcgtaccgggcgttggtgttcctggtgtcggcgtgccgggcgtgggtgttccgggcgtaggtgtcccaggtgtgggcgtaccgggcgttggtgttcctggtgtcggcgtgccgggcgtgggtgttccgggcgtaggtgtcccaggtgtgggcgtaccgggcgttggtgttcctggtgtcggcgtgccgggcgtgggtgttccgggcgtaggtgtcccaggtgtgggcgtaccgggcgttggtgttcctggtgtcggcgtgccgggcgtgggtgttccgggcgtaggtgtcccaggtgtgggcgtaccgggcgttggtgttcctggtgtcggcgtgccgggcgtgggtgttccgggcgtaggtgtcccaggtgtgggcgtaccgggcgttggtgttcctggtgtcggcgtgccgggcgtgggtgttccgggcgtaggtgtcccaggtgtgggcgtaccgggcgttggtgttcctggtgtcggcgtgccgggcgtgggtgttccgggcgtaggtgtcccaggtgtgggcgtaccgggcgttggtgttcctggtgtcggcgtgccgggcgtgggtgttccgggcgtaggtgtcccaggtgtgggcgtaccgggcgttggtgttcctggtgtcggcgtgccgggcgtgggtgttccgggcgtaggtgtcccaggtgtgggcgtaccgggcgttggtgttcctggtgtcggcgtgccgggcgtgggtgttccgggcgtaggtgtcccaggtgtgggcgtaccgggcgttggtgttcctggtgtcggcgtgccgggcgtgggtgttccgggcgtaggtgtcccaggtgtgggcgtaccgggcgttggtgttcctggtgtcggcgtgccgggcagcccgcagttttcgcagcagcgtgaggaagatatttatcgtttcttgaaagacaatggaccgcagcgtgctcttgtcatcgcgcaggcgctgggtatgcgcactgcgaaagatgtgaatcgcgacctgtaccgtatgaagtcgcgtcacttactggacatggacgagcagtcgaaagcatggaccatctaccgctggacgatttatggctactgataatgatcttcaggatccgaattcgagctccgtcgacaagcttgcggccgcactcgagcaccaccaccaccaccactgagatccggctgctaacaaagcccgaaaggaagctgagttggctgctgccaccgctgagcaataactagcataaccccttggggcctctaaacgggtcttgaggggttttttgctgaaaggaggaactatatccggat

SEQ ID NO: 118 - DNA, 6771 bp, synthetic construct
  source 1..6771: mol_type = other DNA
tggcgaatgggacgcgccctgtagcggcgcattaagcgcggcgggtgtggtggttacgcgcagcgtgaccgctacacttgccagcgccctagcgcccgctcctttcgctttcttcccttcctttctcgccacgttcgccggctttccccgtcaagctctaaatcgggggctccctttagggttccgatttagtgctttacggcacctcgaccccaaaaaacttgattagggtgatggttcacgtagtgggccatcgccctgatagacggtttttcgccctttgacgttggagtccacgttctttaatagtggactcttgttccaaactggaacaacactcaaccctatctcggtctattcttttgatttataagggattttgccgatttcggcctattggttaaaaaatgagctgatttaacaaaaatttaacgcgaattttaacaaaatattaacgtttacaatttcaggtggcacttttcggggaaatgtgcgcggaacccctatttgtttatttttctaaatacattcaaatatgtatccgctcatgaattaattcttagaaaaactcatcgagcatcaaatgaaactgcaatttattcatatcaggattatcaataccatatttttgaaaaagccgtttctgtaatgaaggagaaaactcaccgaggcagttccataggatggcaagatcctggtatcggtctgcgattccgactcgtccaacatcaatacaacctattaatttcccctcgtcaaaaataaggttatcaagtgagaaatcaccatgagtgacgactgaatccggtgagaatggcaaaagtttatgcatttctttccagacttgttcaacaggccagccattacgctcgtcatcaaaatcactcgcatcaaccaaaccgttattcattcgtgattgcgcctgagcgagacgaaatacgcgatcgctgttaaaaggacaattacaaacaggaatcgaatgcaaccggcgcaggaacactgccagcgcatcaacaatattttcacctgaatcaggatattcttctaatacctggaatgctgttttcccggggatcgcagtggtgagtaaccatgcatcatcaggagtacggataaaatgcttgatggtcggaagaggcataaattccgtcagccagtttagtctgaccatctcatctgtaacatcattggcaacgctacctttgccatgtttcagaaacaactctggcgcatcgggcttcccatacaatcgatagattgtcgcacctgattgcccgacattatcgcgagcccatttatacccatataaatcagcatccatgttggaatttaatcgcggcctagagcaagacgtttcccgttgaatatggctcataacaccccttgtattactgtttatgtaagcagacagttttattgttcatgaccaaaatcccttaacgtgagttttcgttccactgagcgtcagaccccgtagaaaagatcaaaggatcttcttgagatcctttttttctgcgcgtaatctgctgcttgcaaacaaaaaaaccaccgctaccagcggtggtttgtttgccggatcaagagctaccaactctttttccgaaggtaactggcttcagcagagcgcagataccaaatactgtccttctagtgtagccgtagttaggccaccacttcaagaactctgtagcaccgcctacatacctcgctctgctaatcctgttaccagtggctgctgccagtggcgataagtcgtgtcttaccgggttggactcaagacgatagttaccggataaggcgcagcggtcgggctgaacggggggttcgtgcacacagcccagcttggagcgaacgacctacaccgaactgagatacctacagcgtgagctatgagaaagcgccacgcttcccgaagggagaaaggcggacaggtatccggtaagcggcagggtcggaacaggagagcgcacgagggagcttccagggggaaacgcctggtatctttatagtcctgtcgggtttcgccacctctgacttgagcgtcgatttttgtgatgctcgtcaggggggcggagcctatggaaaaacgccagcaacgcggcctttttacggttcctggccttttgctggccttttgctcacatgttctttcctgcgttatcccctgattctgtggataaccgtattaccgcctttgagtgagctgataccgctcgccgcagccgaacgaccgagcgcagcgagtcagtgagcgaggaagcggaagagcgcctgatgcggtattttctccttacgcatctgtgcggtatttcacaccgcatatatggtgcactctcagtacaatctgctctgatgccgcatagttaagccagtatacactccgctatcgctacgtgactgggtcatggctgcgccccgacacccgccaacacccgctgacgcgccctgacgggcttgtctgctcccggcatccgcttacagacaagctgtgaccgtctccgggagctgcatgtgtcagaggttttcaccgtcatcaccgaaacgcgcgaggcagctgcggtaaagctcatcagcgtggtcgtgaagcgattcacagatgtctgcctgttcatccgcgtccagctcgttgagtttctccagaagcgttaatgtctggcttctgataaagcgggccatgttaagggcggttttttcctgtttggtcactgatgcctccgtgtaagggggatttctgttcatgggggtaatgataccgatgaaacgagagaggatgctcacgatacgggttactgatgatgaacatgcccggttactggaacgttgtgagggtaaacaactggcggtatggatgcggcgggaccagagaaaaatcactcagggtcaatgccagcgcttcgttaatacagatgtaggtgttccacagggtagccagcagcatcctgcgatgcagatccggaacataatggtgcagggcgctgacttccgcgtttccagactttacgaaacacggaaaccgaagaccattcatgttgttgctcaggtcgcagacgttttgcagcagcagtcgcttcacgttcgctcgcgtatcggtgattcattctgctaaccagtaaggcaaccccgccagcctagccgggtcctcaacgacaggagcacgatcatgcgcacccgtggggccgccatgccggcgataatggcctgcttctcgccgaaacgtttggtggcgggaccagtgacgaaggcttgagcgagggcgtgcaagattccgaataccgcaagcgacaggccgatcatcgtcgcgctccagcgaaagcggtcctcgccgaaaatgacccagagcgctgccggcacctgtcctacgagttgcatgataaagaagacagtcataagtgcggcgacgatagtcatgccccgcgcccaccggaaggagctgactgggttgaaggctctcaagggcatcggtcgagatcccggtgcctaatgagtgagctaacttacattaattgcgttgcgctcactgcccgctttccagtcgggaaacctgtcgtgccagctgcattaatgaatcggccaacgcgcggggagaggcggtttgcgtattgggcgccagggtggtttttcttttcaccagtgagacgggcaacagctgattgcccttcaccgcctggccctgagagagttgcagcaagcggtccacgctggtttgccccagcaggcgaaaatcctgtttgatggtggttaacggcgggatataacatgagctgtcttcggtatcgtcgtatcccactaccgagatatccgcaccaacgcgcagcccggactcggtaatggcgcgcattgcgcccagcgccatctgatcgttggcaaccagcatcgcagtgggaacgatgccctcattcagcatttgcatggtttgttgaaaaccggacatggcactccagtcgccttcccgttccgctatcggctgaatttgattgcgagtgagatatttatgccagccagccagacgcagacgcgccgagacagaacttaatgggcccgctaacagcgcgatttgctggtgacccaatgcgaccagatgctccacgcccagtcgcgtaccgtcttcatgggagaaaataatactgttgatgggtgtctggtcagagacatcaagaaataacgccggaacattagtgcaggcagcttccacagcaatggcatcctggtcatccagcggatagttaatgatcagcccactgacgcgttgcgcgagaagattgtgcaccgccgctttacaggcttcgacgccgcttcgttctaccatcgacaccaccacgctggcacccagttgatcggcgcgagatttaatcgccgcgacaatttgcgacggcgcgtgcagggccagactggaggtggcaacgccaatcagcaacgactgtttgcccgccagttgttgtgccacgcggttgggaatgtaattcagctccgccatcgccgcttccactttttcccgcgttttcgcagaaacgtggctggcctggttcaccacgcgggaaacggtctgataagagacaccggcatactctgcgacatcgtataacgttactggtttcacattcaccaccctgaattgactctcttccgggcgctatcatgccataccgcgaaaggttttgcgccattcgatggtgtccgggatctcgacgctctcccttatgcgactcctgcattaggaagcagcccagtagtaggttgaggccgttgagcaccgccgccgcaaggaatggtgcatgcaaggagatggcgcccaacagtcccccggccacggggcctgccaccatacccacgccgaaacaagcgctcatgagcccgaagtggcgagcccgatcttccccatcggtgatgtcggcgatataggcgccagcaaccgcacctgtggcgccggtgatgccggccacgatgcgtccggcgtagaggatcgagatctcgatcccgcgaaattaatacgactcactataggggaattgtgagcggataacaattcccctctagaaataattttgtttaactttaagaaggaggagtacatatgagcaaagggccgggcgtgggtgttccgggcgtaggtgtcccaggtgtgggcgtaccgggcgttggtgttcctggtgtcggcgtgccgggcgtgggtgttccgggcgtaggtgtcccaggtgtgggcgtaccgggcgttggtgttcctggtgtcggcgtgccgggcgtgggtgttccgggcgtaggtgtcccaggtgtgggcgtaccgggcgttggtgttcctggtgtcggcgtgccgggcgtgggtgttccgggcgtaggtgtcccaggtgtgggcgtaccgggcgttggtgttcctggtgtcggcgtgccgggcgtgggtgttccgggcgtaggtgtcccaggtgtgggcgtaccgggcgttggtgttcctggtgtcggcgtgccgggcgtgggtgttccgggcgtaggtgtcccaggtgtgggcgtaccgggcgttggtgttcctggtgtcggcgtgccgggcgtgggtgttccgggcgtaggtgtcccaggtgtgggcgtaccgggcgttggtgttcctggtgtcggcgtgccgggcgtgggtgttccgggcgtaggtgtcccaggtgtgggcgtaccgggcgttggtgttcctggtgtcggcgtgccgggcgtgggtgttccgggcgtaggtgtcccaggtgtgggcgtaccgggcgttggtgttcctggtgtcggcgtgccgggcgtgggtgttccgggcgtaggtgtcccaggtgtgggcgtaccgggcgttggtgttcctggtgtcggcgtgccgggcgtgggtgttccgggcgtaggtgtcccaggtgtgggcgtaccgggcgttggtgttcctggtgtcggcgtgccgggcgtgggtgttccgggcgtaggtgtcccaggtgtgggcgtaccgggcgttggtgttcctggtgtcggcgtgccgggcgtgggtgttccgggcgtaggtgtcccaggtgtgggcgtaccgggcgttggtgttcctggtgtcggcgtgccgggcgtgggtgttccgggcgtaggtgtcccaggtgtgggcgtaccgggcgttggtgttcctggtgtcggcgtgccgggcgtgggtgttccgggcgtaggtgtcccaggtgtgggcgtaccgggcgttggtgttcctggtgtcggcgtgccgggcgtgggtgttccgggcgtaggtgtcccaggtgtgggcgtaccgggcgttggtgttcctggtgtcggcgtgccgggctacgtttgccactttgaaaattgcggtaaagcgtttaagaaacacaaccagcttaaagtacaccagttttctcacactcagcaacttccctatgagtgcccccatgaaggctgtgataaacgcttttcgctgccttctcgcttgaagcgtcacgagaaagtacatgcagggtatccctgtaagaaggatgacagttgcagcttcgtaggtaaaacttggaccctttacctgaaacacgtggcagagtgccatcaggatggctactgataatgatcttcaggatccgaattcgagctccgtcgacaagcttgcggccgcactcgagcaccaccaccaccaccactgagatccggctgctaacaaagcccgaaaggaagctgagttggctgctgccaccgctgagcaataactagcataaccccttggggcctctaaacgggtcttgaggggttttttgctgaaaggaggaactatatccggat

SEQ ID NO: 119 - DNA, 267 bp, synthetic construct
  source 1..267: mol_type = other DNA
gtgcgtaaaatcggagagctggttcgctaccttaataccaaccctgttggagggctgttggaatatgcgcgtagccacggcttcgctgctgagttcaaattggtggatcaaagtgggccgccccacgagccgaagtttgtctatcaagctaaggtggggggacgctggttcccggctgtctgtgcacactcgaaaaaacaaggtaaacaggaggcggcggacgcagctttacgtgttcttattggggagaatgagaaggcggagcgc

SEQ ID NO: 120 - DNA, 198 bp, synthetic construct
  source 1..198: mol_type = other DNA
ctagaaggaaaagtaaagtggtttaattcagagaagggtttcggcttcatcgaagtcgagggtcaagatgacgtgtttgttcactttagcgcgattcagggtgaaggcttcaaaacgctggaagagggccaagctgtgtcctttgagatcgtggagggcaaccgtggtccgcaggcggcaaatgttaccaaagaagcc

SEQ ID NO: 121 - DNA, 234 bp, synthetic construct
  source 1..234: mol_type = other DNA
ggcaaaaaggttattgcgactaaggtattgggtacggttaagtggttcaatgtccgcaacggttacgggttcattaaccgtaatgatacgaaagaggacgtattcgttcatcagacggccattaaaaaaaacaatccccgtaagtacctgcgctctgtaggcgatggtgagacagttgaatttgacgttgtcgagggggagaaaggcgcagaagctgcgaatgttacgggacca

SEQ ID NO: 122 - DNA, 546 bp, synthetic construct
  source 1..546: mol_type = other DNA
aaacatcctcttcagaatcgttgggcgctttggttttttaagaatgacaaatctaaaacatggcaagcgaatcttcgtctgatttcaaagtttgacacagtggaagatttttgggccctttataatcacatccaattaagctctaatctgatgccagggtgcgactatagcttgtttaaggacggtattgaacccatgtgggaagatgaaaagaacaaacgcggtggacgttggcttattactttgaataaacagcagcgtcgtagtgatttagatcgtttctggcttgaaacactgctgtgccttatcggtgaatcctttgacgactactctgacgacgtatgtggcgcagtagtaaacgtgcgtgccaaaggggacaagatcgcaatctggacaacggagtgcgagaatcgtgaagccgttactcacatcggtcgtgtctacaaggaacgcttggggttgccgccaaagattgttatcggctatcagagccacgctgatacagcaaccaaaagcggatcgaccacgaagaatcgttttgtagtg

SEQ ID NO: 123 - DNA, 297 bp, synthetic construct
  source 1..297: mol_type = other DNA
aatactgagaataagtcgcaacctaaacgtttgcacgtatctaacattccgttccgctttcgtgatcctgatttacgccagatgttcggccagtttggtaagattttggatgtagaaattatttttaatgaacgtgggagcaagggatttggctttgtcacgtttgaaaactcagcagacgctgaccgtgctcgtgaaaaattacatggaactgtggtggagggtcgcaagatcgaagttaataatgccacggcgcgtgttatgacgaacaaaaagaccgtcaacccgtacactaat

SEQ ID NO: 124 - DNA, 783 bp, synthetic construct
  source 1..783: mol_type = other DNA
gatagtgtatattcaggacagcaaccctctgtcggcaccgagatctttgtgggcaaaatcccgcgtgatctgttcgaggatgaactggttccgctgttcgaaaaggcgggtccgatttgggatctgcgtctgatgatggatccgctgaccggtttgaatcgcggttatgcgttcgtgacgttttgcaccaaagaagcggcgcaagaagcggtaaaactgtacaataaccacgaaattcgttctggtaaacatatcggcgtgtgcattagcgttgccaacaaccgtctattcgtgggcagcatcccgaaaagcaagaccaaagagcaaattttggaggaattttcgaaggtgactgagggcctgaccgatgttattctgtaccatcagccggacgacaaaaagaagaaccgcggtttttgtttcctggagtatgaagaccacaaaaccgcagcccaggctcgtcgcagacttatgagcggtaaggtcaaggtgtggggtaatgttgggaccgttgaatgggctgatccaatcgaggacccggacccggaagttatggccaaagttaaagtgctgttcgtgcgtaatctggcgaacaccgtcacggaggaaatcttggaaaaagcgttctcccagtttggtaagttggagcgtgttaagaaactgaaagactacgcgttcatccactttgatgagcgcgacggcgcagttaaggctatggaggaaatgaacggcaaggacttagagggtgaaaacattgaaatcgtgtttgcaaagccgcctgac

SEQ ID NO: 125 - DNA, 456 bp, synthetic construct
  source 1..456: mol_type = other DNA
atgagtgaactatcagtagctcaaaaacccgagaagctgttggagcgctgtaagtactggcctgcctgcaagaatggtgatgaatgcgcgtatcaccaccccatcagcccgtgtaaggcgtttccgaactgcaagtttgcagaaaagtgcctgtttgttcatccgaattgcaaatacgacgcaaaatgcaccaaaccggattgtccgttcacccatgttagccgtagaatcccggtcctctccccgaaaccggctgtggctccgccagcgccaccgtctagctcgcaactgtgccgttatttcccggcgtgcaagaaaatggagtgcccgttctaccacccgaaacactgccgtttcaacacccagtgtacgcgtccggactgtactttttatcacccgaccattaacgtgccgcctcgtcatgcgctgaaatggattcgcccgcagaccagcgaa

SEQ ID NO: 126 - DNA, 519 bp, synthetic construct
  source 1..519: mol_type = other DNA
agctacccaatggcgagcctgtatgtcggagaccttcaccctgatgttaccgaggccatgctgtatgagaaattcagcccagctggtccgatcctttccattcgcgtgtgccgcgatatgatcacacgtcgttcccttggttacgcctatgtaaattttcaacaaccagccgatgcagaacgcgccttggacactatgaatttcgatgtgattaagggtaaaccggttcgcattatgtggtcccaacgtgatccttcgcttcgcaagtctggggtagggaacatctttattaaaaatctggacaagtccattgataacaaagcattatatgataccttctcagcgttcgggaacattttatcctgtaaggttgtgtgcgacgaaaatggaagcaaaggctatggctttgtacattttgagacacaggaggcggcagagcgtgccattgaaaagatgaatggaatgttacttaatgaccgtaaggtgttcgtcggtcgttttaaatcgcgcaaggaacgc

SEQ ID NO: 127 - DNA, 552 bp, synthetic construct
  source 1..552: mol_type = other DNA
ggagctatagaagatcccgaactagaggcaatcaaggcgcgcgtgagagaaatggaagaggaagccgagaagctgaaagagttgcaaaacgaagtggaaaagcagatgaatatgagtccgccgccaggcaacgccggtccggtcatcatgtctatcgaggaaaagatggaagctgatgcacgctctatctacgtgggtaacgtggattacggcgcgaccgcggaagagctggaagcgcattttcacggttgtggtagcgttaatcgtgttaccattctgtgcgataaattctccggtcacccgaaaggttttgcatatatcgaatttagcgacaaggagagcgttcgtacgagcctggcgctggacgagtccttgtttcgtggtcgtcagattaaagttattccgaaacgtacgaaccgtccgggtattagcaccactgaccgtggcttcccgcgtgcgcgctaccgcgctcgcaccaccaattataactccagccgcagccgtttctacagcggcttcaactcgagacctcgtggccgtgtctatcgtggc

SEQ ID NO: 128 - DNA, 798 bp, synthetic construct
  source 1..798: mol_type = other DNA
ggaaattcagtaacatatagtactctaatatccggtctgggcaaggcgggtcgcctggaagaggcgctggaactgttcgaggaaatgaaggagaaaggcatcgtgccaacggttgtgacctacaccacactgatcaacggcctgggtaaagctgggaagcttgacgaagccttggaattgttcgaggaaatgaaagagaagggtctggttccgaatattgttacgtatacttctctgattaacggcctgggtaaggcaggtcgtgtggaagaggcgctggaattatttgatgagatgaaagaaagaggtgttgtgccgaacgtggtgacctttagcaccctaatcagcggttttgcacgtgcaggccgtttggaggaagcgctggaactgttcgaagagatgaaagaaaagggcatcgtgccgagcgttgtaacgtacaccaccctgattgacggtttatgcaaggctggcaagctggacgaggcgctgaaactgttcgaagagatggtagagaagggtatcaaaccgaacgtggtcacctataccaccctgatcgacggcttgggtcgtgctggcaaattagatgaggcgctcaaattgttcgaggaaatggtggagaaaggtatcaagccgaatgttgtcacgtactcgaccctgattgatggtctttgcaaagcgggtaagctggatgaagcgttgaagctgttcgaggaaatggtcgagaagggcattaaaccgaccgttgagttgacttaccgccgtgttgttgaaagctattgtcgtgccaaacgttttgaa

SEQ ID NO: 129 - DNA, 1047 bp, synthetic construct
  source 1..1047: mol_type = other DNA
ggccgttcccgccttcttgaggattttcgtaataaccgttaccctaatttacagttacgtgaaattgcgggacacattatggagttctctcaggatcaacacggctcccgtttcatccaactgaaattggaacgtgcgacaccggctgaacgtcagttggtgttcaatgagattttacaggcagcttaccagttgatggttgatgttttcggggtcttcgtaatccagaaattctttgagttcgggtcgttagagcaaaagttggctttagcggagcgcattcgtggccatgttttgtcgttggctttgcagatgtatggtacacgtgtcatccaaaaagcacttgagttcattccatccgaccaacagaacgagatggttcgtgagttagatggccatgtactgaaatgcgtgaaggaccagaatggccgcggagtggtctacaaatgcatcgagtgtgtccagccccagtcattgcaattcatcattgatgcatttaagggtcaagtttttgccttgtccactcatccctatggtccacacgtcatccaacgtattttagagcattgcctgcccgaccagacattgccaatcttagaagaactgcatcaacacaccgaacaactggtgcaggatcagtatggggtgtgggtcattcatcatgtgcttgaacatggacgtccagaagacaagtccaagattgtggccgagatccgtgggaacgtattagttctgagccaacacaaattcgcaatgcacgtagtgcagaaatgtgtaacccatgccagtcgcactgaacgcgctgtattgatcgatgaggtttgcaccatgaatgatgggccccatagtgccttatacacgatgatgaaagaccaatatgctcaattggtggtgcgtaagatgattgacgtcgcggagcctggccaacgtaaaatcgttatgcataaaatccgcccccacatcgcaactttgcgtaagtatacatacggaaaacacatcttggccaagttagaaaaatactatatgaaaaacggggtagatttaggg

SEQ ID NO: 130 - DNA, 216 bp, synthetic construct
  source 1..216: mol_type = other DNA
gacaagaaatcacccatttcgcaggtacatgagatcggaattaaacgtaacatgacagtccactttaaggtgttacgcgaggaaggaccggctcacatgaagaacttcatcaccgcttgcatcgtaggttcaattgtaaccgagggtgaggggaacggaaagaaagtcagtaagaaacgtgcggctgagaagatgcttgtagagcttcaaaagtta

SEQ ID NO: 131 - DNA, 225 bp, synthetic construct
  source 1..225: mol_type = other DNA
agcacccgctataaaaccgaactgtgccgcccgtttgaagaaagcggcacgtgcaaatacggcgagaaatgccagttcgcccatggcttccatgaactgcgcagtctgacgcgccatccgaagtacaaaaccgagctgtgccgcaccttccataccatcggcttttgtccgtacggcccgcgctgccacttcatccataatgcggatgaatgataatgaggatcc

SEQ ID NO: 132 - DNA, 207 bp, synthetic construct
  source 1..207: mol_type = other DNA
agcccgcagttttcgcagcagcgtgaggaagatatttatcgtttcttgaaagacaatggaccgcagcgtgctcttgtcatcgcgcaggcgctgggtatgcgcactgcgaaagatgtgaatcgcgacctgtaccgtatgaagtcgcgtcacttactggacatggacgagcagtcgaaagcatggaccatctaccgctggacgatttat

SEQ ID NO: 133 - DNA, 258 bp, synthetic construct
  source 1..258: mol_type = other DNA
tacgtttgccactttgaaaattgcggtaaagcgtttaagaaacacaaccagcttaaagtacaccagttttctcacactcagcaacttccctatgagtgcccccatgaaggctgtgataaacgcttttcgctgccttctcgcttgaagcgtcacgagaaagtacatgcagggtatccctgtaagaaggatgacagttgcagcttcgtaggtaaaacttggaccctttacctgaaacacgtggcagagtgccatcaggat

SEQ ID NO: 134 - DNA, 6506 bp, synthetic construct
  source 1..6506: mol_type = other DNA
tggcgaatgggacgcgccctgtagcggcgcattaagcgcggcgggtgtggtggttacgcgcagcgtgaccgctacacttgccagcgccctagcgcccgctcctttcgctttcttcccttcctttctcgccacgttcgccggctttccccgtcaagctctaaatcgggggctccctttagggttccgatttagtgctttacggcacctcgaccccaaaaaacttgattagggtgatggttcacgtagtgggccatcgccctgatagacggtttttcgccctttgacgttggagtccacgttctttaatagtggactcttgttccaaactggaacaacactcaaccctatctcggtctattcttttgatttataagggattttgccgatttcggcctattggttaaaaaatgagctgatttaacaaaaatttaacgcgaattttaacaaaatattaacgcttacaatttaggtggcacttttcggggaaatgtgcgcggaacccctatttgtttatttttctaaatacattcaaatatgtatccgctcatgaattaattcttagaaaaactcatcgagcatcaaatgaaactgcaatttattcatatcaggattatcaataccatatttttgaaaaagccgtttctgtaatgaaggagaaaactcaccgaggcagttccataggatggcaagatcctggtatcggtctgcgattccgactcgtccaacatcaatacaacctattaatttcccctcgtcaaaaataaggttatcaagtgagaaatcaccatgagtgacgactgaatccggtgagaatggcaaaagtttatgcatttctttccagacttgttcaacaggccagccattacgctcgtcatcaaaatcactcgcatcaaccaaaccgttattcattcgtgattgcgcctgagcgagacgaaatacgcgatcgctgttaaaaggacaattacaaacaggaatcgaatgcaaccggcgcaggaacactgccagcgcatcaacaatattttcacctgaatcaggatattcttctaatacctggaatgctgttttcccggggatcgcagtggtgagtaaccatgcatcatcaggagtacggataaaatgcttgatggtcggaagaggcataaattccgtcagccagtttagtctgaccatctcatctgtaacatcattggcaacgctacctttgccatgtttcagaaacaactctggcgcatcgggcttcccatacaatcgatagattgtcgcacctgattgcccgacattatcgcgagcccatttatacccatataaatcagcatccatgttggaatttaatcgcggcctagagcaagacgtttcccgttgaatatggctcataacaccccttgtattactgtttatgtaagcagacagttttattgttcatgaccaaaatcccttaacgtgagttttcgttccactgagcgtcagaccccgtagaaaagatcaaaggatcttcttgagatcctttttttctgcgcgtaatctgctgcttgcaaacaaaaaaaccaccgctaccagcggtggtttgtttgccggatcaagagctaccaactctttttccgaaggtaactggcttcagcagagcgcagataccaaatactgtccttctagtgtagccgtagttaggccaccacttcaagaactctgtagcaccgcctacatacctcgctctgctaatcctgttaccagtggctgctgccagtggcgataagtcgtgtcttaccgggttggactcaagacgatagttaccggataaggcgcagcggtcgggctgaacggggggttcgtgcacacagcccagcttggagcgaacgacctacaccgaactgagatacctacagcgtgagctatgagaaagcgccacgcttcccgaagggagaaaggcggacaggtatccggtaagcggcagggtcggaacaggagagcgcacgagggagcttccagggggaaacgcctggtatctttatagtcctgtcgggtttcgccacctctgacttgagcgtcgatttttgtgatgctcgtcaggggggcggagcctatggaaaaacgccagcaacgcggcctttttacggttcctggccttttgctggccttttgctcacatgttctttcctgcgttatcccctgattctgtggataaccgtattaccgcctttgagtgagctgataccgctcgccgcagccgaacgaccgagcgcagcgagtcagtgagcgaggaagcggaagagcgcctgatgcggtattttctccttacgcatctgtgcggtatttcacaccgcaatggtgcactctcagtacaatctgctctgatgccgcatagttaagccagtatacactccgctatcgctacgtgactgggtcatggctgcgccccgacacccgccaacacccgctgacgcgccctgacgggcttgtctgctcccggcatccgcttacagacaagctgtgaccgtctccgggagctgcatgtgtcagaggttttcaccgtcatcaccgaaacgcgcgaggcagctgcggtaaagctcatcagcgtggtcgtgaagcgattcacagatgtctgcctgttcatccgcgtccagctcgttgagtttctccagaagcgttaatgtctggcttctgataaagcgggccatgttaagggcggttttttcctgtttggtcactgatgcctccgtgtaagggggatttctgttcatgggggtaatgataccgatgaaacgagagaggatgctcacgatacgggttactgatgatgaacatgcccggttactggaacgttgtgagggtaaacaactggcggtatggatgcggcgggaccagagaaaaatcactcagggtcaatgccagcgcttcgttaatacagatgtaggtgttccacagggtagccagcagcatcctgcgatgcagatccggaacataatggtgcagggcgctgacttccgcgtttccagactttacgaaacacggaaaccgaagaccattcatgttgttgctcaggtcgcagacgttttgcagcagcagtcgcttcacgttcgctcgcgtatcggtgattcattctgctaaccagtaaggcaaccccgccagcctagccgggtcctcaacgacaggagcacgatcatgcgcacccgtggggccgccatgccggcgataatggcctgcttctcgccgaaacgtttggtggcgggaccagtgacgaaggcttgagcgagggcgtgcaagattccgaataccgcaagcgacaggccgatcatcgtcgcgctccagcgaaagcggtcctcgccgaaaatgacccagagcgctgccggcacctgtcctacgagttgcatgataaagaagacagtcataagtgcggcgacgatagtcatgccccgcgcccaccggaaggagctgactgggttgaaggctctcaagggcatcggtcgagatcccggtgcctaatgagtgagctaacttacattaattgcgttgcgctcactgcccgctttccagtcgggaaacctgtcgtgccagctgcattaatgaatcggccaacgcgcggggagaggcggtttgcgtattgggcgccagggtggtttttcttttcaccagtgagacgggcaacagctgattgcccttcaccgcctggccctgagagagttgcagcaagcggtccacgctggtttgccccagcaggcgaaaatcctgtttgatggtggttaacggcgggatataacatgagctgtcttcggtatcgtcgtatcccactaccgagatatccgcaccaacgcgcagcccggactcggtaatggcgcgcattgcgcccagcgccatctgatcgttggcaaccagcatcgcagtgggaacgatgccctcattcagcatttgcatggtttgttgaaaaccggacatggcactccagtcgccttcccgttccgctatcggctgaatttgattgcgagtgagatatttatgccagccagccagacgcagacgcgccgagacagaacttaatgggcccgctaacagcgcgatttgctggtgacccaatgcgaccagatgctccacgcccagtcgcgtaccgtcttcatgggagaaaataatactgttgatgggtgtctggtcagagacatcaagaaataacgccggaacattagtgcaggcagcttccacagcaatggcatcctggtcatccagcggatagttaatgatcagcccactgacgcgttgcgcgagaagattgtgcaccgccgctttacaggcttcgacgccgcttcgttctaccatcgacaccaccacgctggcacccagttgatcggcgcgagatttaatcgccgcgacaatttgcgacggcgcgtgcagggccagactggaggtggcaacgccaatcagcaacgactgtttgcccgccagttgttgtgccacgcggttgggaatgtaattcagctccgccatcgccgcttccactttttcccgcgttttcgcagaaacgtggctggcctggttcaccacgcgggaaacggtctgataagagacaccggcatactctgcgacatcgtataacgttactggtttcacattcaccaccctgaattgactctcttccgggcgctatcatgccataccgcgaaaggttttgcgccattcgatggtgtccgggatctcgacgctctcccttatgcgactcctgcattaggaagcagcccagtagtaggttgaggccgttgagcaccgccgccgcaaggaatggtgcatgcaaggagatggcgcccaacagtcccccggccacggggcctgccaccatacccacgccgaaacaagcgctcatgagcccgaagtggcgagcccgatcttccccatcggtgatgtcggcgatataggcgccagcaaccgcacctgtggcgccggtgatgccggccacgatgcgtccggcgtagaggatcgagatctcgatcccgcgaaattaatacgactcactataggggaattgtgagcggataacaattcccctctagaaataattttgtttaactttaagaaggaggagtacatatgagcaaagggccgggcgtgggtgttccgggcgtaggtgtcccaggtgtgggcgtaccgggcgttggtgttcctggtgtcggcgtgccgggcgtgggtgttccgggcgtaggtgtcccaggtgtgggcgtaccgggcgttggtgttcctggtgtcggcgtgccgggcgtgggtgttccgggcgtaggtgtcccaggtgtgggcgtaccgggcgttggtgttcctggtgtcggcgtgccgggcgtgggtgttccgggcgtaggtgtcccaggtgtgggcgtaccgggcgttggtgttcctggtgtcggcgtgccgggcgtgggtgttccgggcgtaggtgtcccaggtgtgggcgtaccgggcgttggtgttcctggtgtcggcgtgccgggcgtgggtgttccgggcgtaggtgtcccaggtgtgggcgtaccgggcgttggtgttcctggtgtcggcgtgccgggcgtgggtgttccgggcgtaggtgtcccaggtgtgggcgtaccgggcgttggtgttcctggtgtcggcgtgccgggcgtgggtgttccgggcgtaggtgtcccaggtgtgggcgtaccgggcgttggtgttcctggtgtcggcgtgccgggcgtgggtgttccgggcgtaggtgtcccaggtgtgggcgtaccgggcgttggtgttcctggtgtcggcgtgccgggcgtgggtgttccgggcgtaggtgtcccaggtgtgggcgtaccgggcgttggtgttcctggtgtcggcgtgccgggcgtgggtgttccgggcgtaggtgtcccaggtgtgggcgtaccgggcgttggtgttcctggtgtcggcgtgccgggcgtgggtgttccgggcgtaggtgtcccaggtgtgggcgtaccgggcgttggtgttcctggtgtcggcgtgccgggcgtgggtgttccgggcgtaggtgtcccaggtgtgggcgtaccgggcgttggtgttcctggtgtcggcgtgccgggcgtgggtgttccgggcgtaggtgtcccaggtgtgggcgtaccgggcgttggtgttcctggtgtcggcgtgccgggcgtgggtgttccgggcgtaggtgtcccaggtgtgggcgtaccgggcgttggtgttcctggtgtcggcgtgccgggcgtgggtgttccgggcgtaggtgtcccaggtgtgggcgtaccgggcgttggtgttcctggtgtcggcgtgccgggctactgataatgatcttcaggatccgaattcgagctccgtcgacaagcttgcggccgcactcgagcaccaccaccaccaccactgagatccggctgctaacaaagcccgaaaggaagctgagttggctgctgccaccgctgagcaataactagcataaccccttggggcctctaaacgggtcttgaggggttttttgctgaaaggaggaactatatccggat

SEQ ID NO: 135 - DNA, 6807 bp, synthetic construct
  source 1..6807: mol_type = other DNA
tggcgaatgggacgcgccctgtagcggcgcattaagcgcggcgggtgtggtggttacgcgcagcgtgaccgctacacttgccagcgccctagcgcccgctcctttcgctttcttcccttcctttctcgccacgttcgccggctttccccgtcaagctctaaatcgggggctccctttagggttccgatttagtgctttacggcacctcgaccccaaaaaacttgattagggtgatggttcacgtagtgggccatcgccctgatagacggtttttcgccctttgacgttggagtccacgttctttaatagtggactcttgttccaaactggaacaacactcaaccctatctcggtctattcttttgatttataagggattttgccgatttcggcctattggttaaaaaatgagctgatttaacaaaaatttaacgcgaattttaacaaaatattaacgtttacaatttcaggtggcacttttcggggaaatgtgcgcggaacccctatttgtttatttttctaaatacattcaaatatgtatccgctcatgaattaattcttagaaaaactcatcgagcatcaaatgaaactgcaatttattcatatcaggattatcaataccatatttttgaaaaagccgtttctgtaatgaaggagaaaactcaccgaggcagttccataggatggcaagatcctggtatcggtctgcgattccgactcgtccaacatcaatacaacctattaatttcccctcgtcaaaaataaggttatcaagtgagaaatcaccatgagtgacgactgaatccggtgagaatggcaaaagtttatgcatttctttccagacttgttcaacaggccagccattacgctcgtcatcaaaatcactcgcatcaaccaaaccgttattcattcgtgattgcgcctgagcgagacgaaatacgcgatcgctgttaaaaggacaattacaaacaggaatcgaatgcaaccggcgcaggaacactgccagcgcatcaacaatattttcacctgaatcaggatattcttctaatacctggaatgctgttttcccggggatcgcagtggtgagtaaccatgcatcatcaggagtacggataaaatgcttgatggtcggaagaggcataaattccgtcagccagtttagtctgaccatctcatctgtaacatcattggcaacgctacctttgccatgtttcagaaacaactctggcgcatcgggcttcccatacaatcgatagattgtcgcacctgattgcccgacattatcgcgagcccatttatacccatataaatcagcatccatgttggaatttaatcgcggcctagagcaagacgtttcccgttgaatatggctcataacaccccttgtattactgtttatgtaagcagacagttttattgttcatgaccaaaatcccttaacgtgagttttcgttccactgagcgtcagaccccgtagaaaagatcaaaggatcttcttgagatcctttttttctgcgcgtaatctgctgcttgcaaacaaaaaaaccaccgctaccagcggtggtttgtttgccggatcaagagctaccaactctttttccgaaggtaactggcttcagcagagcgcagataccaaatactgtccttctagtgtagccgtagttaggccaccacttcaagaactctgtagcaccgcctacatacctcgctctgctaatcctgttaccagtggctgctgccagtggcgataagtcgtgtcttaccgggttggactcaagacgatagttaccggataaggcgcagcggtcgggctgaacggggggttcgtgcacacagcccagcttggagcgaacgacctacaccgaactgagatacctacagcgtgagctatgagaaagcgccacgcttcccgaagggagaaaggcggacaggtatccggtaagcggcagggtcggaacaggagagcgcacgagggagcttccagggggaaacgcctggtatctttatagtcctgtcgggtttcgccacctctgacttgagcgtcgatttttgtgatgctcgtcaggggggcggagcctatggaaaaacgccagcaacgcggcctttttacggttcctggccttttgctggccttttgctcacatgttctttcctgcgttatcccctgattctgtggataaccgtattaccgcctttgagtgagctgataccgctcgccgcagccgaacgaccgagcgcagcgagtcagtgagcgaggaagcggaagagcgcctgatgcggtattttctccttacgcatctgtgcggtatttcacaccgcatatatggtgcactctcagtacaatctgctctgatgccgcatagttaagccagtatacactccgctatcgctacgtgactgggtcatggctgcgccccgacacccgccaacacccgctgacgcgccctgacgggcttgtctgctcccggcatccgcttacagacaagctgtgaccgtctccgggagctgcatgtgtcagaggttttcaccgtcatcaccgaaacgcgcgaggcagctgcggtaaagctcatcagcgtggtcgtgaagcgattcacagatgtctgcctgttcatccgcgtccagctcgttgagtttctccagaagcgttaatgtctggcttctgataaagcgggccatgttaagggcggttttttcctgtttggtcactgatgcctccgtgtaagggggatttctgttcatgggggtaatgataccgatgaaacgagagaggatgctcacgatacgggttactgatgatgaacatgcccggttactggaacgttgtgagggtaaacaactggcggtatggatgcggcgggaccagagaaaaatcactcagggtcaatgccagcgcttcgttaatacagatgtaggtgttccacagggtagccagcagcatcctgcgatgcagatccggaacataatggtgcagggcgctgacttccgcgtttccagactttacgaaacacggaaaccgaagaccattcatgttgttgctcaggtcgcagacgttttgcagcagcagtcgcttcacgttcgctcgcgtatcggtgattcattctgctaaccagtaaggcaaccccgccagcctagccgggtcctcaacgacaggagcacgatcatgcgcacccgtggggccgccatgccggcgataatggcctgcttctcgccgaaacgtttggtggcgggaccagtgacgaaggcttgagcgagggcgtgcaagattccgaataccgcaagcgacaggccgatcatcgtcgcgctccagcgaaagcggtcctcgccgaaaatgacccagagcgctgccggcacctgtcctacgagttgcatgataaagaagacagtcataagtgcggcgacgatagtcatgccccgcgcccaccggaaggagctgactgggttgaaggctctcaagggcatcggtcgagatcccggtgcctaatgagtgagctaacttacattaattgcgttgcgctcactgcccgctttccagtcgggaaacctgtcgtgccagctgcattaatgaatcggccaacgcgcggggagaggcggtttgcgtattgggcgccagggtggtttttcttttcaccagtgagacgggcaacagctgattgcccttcaccgcctggccctgagagagttgcagcaagcggtccacgctggtttgccccagcaggcgaaaatcctgtttgatggtggttaacggcgggatataacatgagctgtcttcggtatcgtcgtatcccactaccgagatatccgcaccaacgcgcagcccggactcggtaatggcgcgcattgcgcccagcgccatctgatcgttggcaaccagcatcgcagtgggaacgatgccctcattcagcatttgcatggtttgttgaaaaccggacatggcactccagtcgccttcccgttccgctatcggctgaatttgattgcgagtgagatatttatgccagccagccagacgcagacgcgccgagacagaacttaatgggcccgctaacagcgcgatttgctggtgacccaatgcgaccagatgctccacgcccagtcgcgtaccgtcttcatgggagaaaataatactgttgatgggtgtctggtcagagacatcaagaaataacgccggaacattagtgcaggcagcttccacagcaatggcatcctggtcatccagcggatagttaatgatcagcccactgacgcgttgcgcgagaagattgtgcaccgccgctttacaggcttcgacgccgcttcgttctaccatcgacaccaccacgctggcacccagttgatcggcgcgagatttaatcgccgcgacaatttgcgacggcgcgtgcagggccagactggaggtggcaacgccaatcagcaacgactgtttgcccgccagttgttgtgccacgcggttgggaatgtaattcagctccgccatcgccgcttccactttttcccgcgttttcgcagaaacgtggctggcctggttcaccacgcgggaaacggtctgataagagacaccggcatactctgcgacatcgtataacgttactggtttcacattcaccaccctgaattgactctcttccgggcgctatcatgccataccgcgaaaggttttgcgccattcgatggtgtccgggatctcgacgctctcccttatgcgactcctgcattaggaagcagcccagtagtaggttgaggccgttgagcaccgccgccgcaaggaatggtgcatgcaaggagatggcgcccaacagtcccccggccacggggcctgccaccatacccacgccgaaacaagcgctcatgagcccgaagtggcgagcccgatcttccccatcggtgatgtcggcgatataggcgccagcaaccgcacctgtggcgccggtgatgccggccacgatgcgtccggcgtagaggatcgagatctcgatcccgcgaaattaatacgactcactataggggaattgtgagcggataacaattcccctctagaaataattttgtttaactttaagaaggaggagtacatatgagcaaagggccgggagtgggcgttccggggctgggtgttccgggcgtcggtgtgccaggtctgggtgtaccgggtgttggcgtccctggtgtgggcgttccggggctgggtgttccgggcgtcggtgtgccaggtctgggtgtaccgggtgttggcgtccctggtgtgggcgttccggggctgggtgttccgggcgtcggtgtgccaggtctgggtgtaccgggtgttggcgtccctggtgtgggcgttccggggctgggtgttccgggcgtcggtgtgccaggtctgggtgtaccgggtgttggcgtccctggtgtgggcgttccggggctgggtgttccgggcgtcggtgtgccaggtctgggtgtaccgggtgttggcgtccctggtgtgggcgttccggggctgggtgttccgggcgtcggtgtgccaggtctgggtgtaccgggtgttggcgtccctggtgtgggcgttccggggctgggtgttccgggcgtcggtgtgccaggtctgggtgtaccgggtgttggcgtccctggtgtgggcgttccggggctgggtgttccgggcgtcggtgtgccaggtctgggtgtaccgggtgttggcgtccctggtgtgggcgttccggggctgggtgttccgggcgtcggtgtgccaggtctgggtgtaccgggtgttggcgtccctggtgtgggcgttccggggctgggtgttccgggcgtcggtgtgccaggtctgggtgtaccgggtgttggcgtccctggtgtgggcgttccggggctgggtgttccgggcgtcggtgtgccaggtctgggtgtaccgggtgttggcgtccctggtgtgggcgttccggggctgggtgttccgggcgtcggtgtgccaggtctgggtgtaccgggtgttggcgtccctggtgtgggcgttccggggctgggtgttccgggcgtcggtgtgccaggtctgggtgtaccgggtgttggcgtccctggtgtgggcgttccggggctgggtgttccgggcgtcggtgtgccaggtctgggtgtaccgggtgttggcgtccctggtgtgggcgttccggggctgggtgttccgggcgtcggtgtgccaggtctgggtgtaccgggtgttggcgtccctggtgtgggcgttccggggctgggtgttccgggcgtcggtgtgccaggtctgggtgtaccgggtgttggcgtccctgggaatcggccaccaattgcgatcgtgtcaccgcagttccaagaaatctctttaccgacaacttctactgtcattgatggcagccagagcaccgatgatgataaaatcgtccagtaccactgggaggaattgaaagggccactgcgcgaagaaaaaattagcgaggacactgccattcttaaactgagtaagctcgtaccggggaactacacgttctctttgacagtagtcgattcggatggggcgaccaactccacaacggcgaatctgacagttaacaaggctgtggattatccgggctactgataatgatcttcaggatccgaattcgagctccgtcgacaagcttgcggccgcactcgagcaccaccaccaccaccactgagatccggctgctaacaaagcccgaaaggaagctgagttggctgctgccaccgctgagcaataactagcataaccccttggggcctctaaacgggtcttgaggggttttttgctgaaaggaggaactatatccggat

SEQ ID NO: 136 - DNA, 1215 bp, synthetic construct
  source 1..1215: mol_type = other DNA
atgagcaaagggccgggcgtgggtgttccgggcgtaggtgtcccaggtgtgggcgtaccgggcgttggtgttcctggtgtcggcgtgccgggcgtgggtgttccgggcgtaggtgtcccaggtgtgggcgtaccgggcgttggtgttcctggtgtcggcgtgccgggcgtgggtgttccgggcgtaggtgtcccaggtgtgggcgtaccgggcgttggtgttcctggtgtcggcgtgccgggcgtgggtgttccgggcgtaggtgtcccaggtgtgggcgtaccgggcgttggtgttcctggtgtcggcgtgccgggcgtgggtgttccgggcgtaggtgtcccaggtgtgggcgtaccgggcgttggtgttcctggtgtcggcgtgccgggcgtgggtgttccgggcgtaggtgtcccaggtgtgggcgtaccgggcgttggtgttcctggtgtcggcgtgccgggcgtgggtgttccgggcgtaggtgtcccaggtgtgggcgtaccgggcgttggtgttcctggtgtcggcgtgccgggcgtgggtgttccgggcgtaggtgtcccaggtgtgggcgtaccgggcgttggtgttcctggtgtcggcgtgccgggcgtgggtgttccgggcgtaggtgtcccaggtgtgggcgtaccgggcgttggtgttcctggtgtcggcgtgccgggcgtgggtgttccgggcgtaggtgtcccaggtgtgggcgtaccgggcgttggtgttcctggtgtcggcgtgccgggcgtgggtgttccgggcgtaggtgtcccaggtgtgggcgtaccgggcgttggtgttcctggtgtcggcgtgccgggcgtgggtgttccgggcgtaggtgtcccaggtgtgggcgtaccgggcgttggtgttcctggtgtcggcgtgccgggcgtgggtgttccgggcgtaggtgtcccaggtgtgggcgtaccgggcgttggtgttcctggtgtcggcgtgccgggcgtgggtgttccgggcgtaggtgtcccaggtgtgggcgtaccgggcgttggtgttcctggtgtcggcgtgccgggcgtgggtgttccgggcgtaggtgtcccaggtgtgggcgtaccgggcgttggtgttcctggtgtcggcgtgccgggcgtgggtgttccgggcgtaggtgtcccaggtgtgggcgtaccgggcgttggtgttcctggtgtcggcgtgccg

SEQ ID NO: 137 - DNA, 1218 bp, synthetic construct
  source 1..1218: mol_type = other DNA
atgagcaaagggccgggagtgggcgttccggggctgggtgttccgggcgtcggtgtgccaggtctgggtgtaccgggtgttggcgtccctggtgtgggcgttccggggctgggtgttccgggcgtcggtgtgccaggtctgggtgtaccgggtgttggcgtccctggtgtgggcgttccggggctgggtgttccgggcgtcggtgtgccaggtctgggtgtaccgggtgttggcgtccctggtgtgggcgttccggggctgggtgttccgggcgtcggtgtgccaggtctgggtgtaccgggtgttggcgtccctggtgtgggcgttccggggctgggtgttccgggcgtcggtgtgccaggtctgggtgtaccgggtgttggcgtccctggtgtgggcgttccggggctgggtgttccgggcgtcggtgtgccaggtctgggtgtaccgggtgttggcgtccctggtgtgggcgttccggggctgggtgttccgggcgtcggtgtgccaggtctgggtgtaccgggtgttggcgtccctggtgtgggcgttccggggctgggtgttccgggcgtcggtgtgccaggtctgggtgtaccgggtgttggcgtccctggtgtgggcgttccggggctgggtgttccgggcgtcggtgtgccaggtctgggtgtaccgggtgttggcgtccctggtgtgggcgttccggggctgggtgttccgggcgtcggtgtgccaggtctgggtgtaccgggtgttggcgtccctggtgtgggcgttccggggctgggtgttccgggcgtcggtgtgccaggtctgggtgtaccgggtgttggcgtccctggtgtgggcgttccggggctgggtgttccgggcgtcggtgtgccaggtctgggtgtaccgggtgttggcgtccctggtgtgggcgttccggggctgggtgttccgggcgtcggtgtgccaggtctgggtgtaccgggtgttggcgtccctggtgtgggcgttccggggctgggtgttccgggcgtcggtgtgccaggtctgggtgtaccgggtgttggcgtccctggtgtgggcgttccggggctgggtgttccgggcgtcggtgtgccaggtctgggtgtaccgggtgttggcgtccctggtgtgggcgttccggggctgggtgttccgggcgtcggtgtgccaggtctgggtgtaccgggtgttggcgtccctggg

SEQ ID NO: 138 - DNA, 831 bp, synthetic construct
  source 1..831: mol_type = other DNA
tagccagggacgccaacacccggtacacccagacctggcacaccgacgcccggaacacccagccccggaacgcccacaccagggacgccaacacccggtacacccagacctggcacaccgacgcccggaacacccagccccggaacgcccacaccagggacgccaacacccggtacacccagacctggcacaccgacgcccggaacacccagccccggaacgcccacaccagggacgccaacacccggtacacccagacctggcacaccgacgcccggaacacccagccccggaacgcccacaccagggacgccaacacccggtacacccagacctggcacaccgacgcccggaacacccagccccggaacgcccacaccagggacgccaacacccggtacacccagacctggcacaccgacgcccggaacacccagccccggaacgcccacaccagggacgccaacacccggtacacccagacctggcacaccgacgcccggaacacccagccccggaacgcccacaccagggacgccaacacccggtacacccagacctggcacaccgacgcccggaacacccagccccggaacgcccacaccagggacgccaacacccggtacacccagacctggcacaccgacgcccggaacacccagccccggaacgcccacaccagggacgccaacacccggtacacccagacctggcacaccgacgcccggaacacccagccccggaacgcccacaccagggacgccaacacccggtacacccagacctggcacancgacgcccggaacacccagccccggaacgcccacacca

SEQ ID NO: 139 - DNA, 804 bp, synthetic construct
  source 1..804: mol_type = other DNA
tagcccggcacgccgacaccaggaacaccaacgcccggtacgcccacacctgggacacctacgcccggaacacccacgcccggcacgccgacaccaggaacaccaacgcccggtacgcccacacctgggacacctacgcccggaacacccacgcccggcacgccgacaccaggaacaccaacgcccggtacgcccacacctgggacacctacgcccggaacacccacgcccggcacgccgacaccaggaacaccaacgcccggtacgcccacacctgggacacctacgcccggaacacccacgcccggcacgccgacaccaggaacaccaacgcccggtacgcccacacctgggacacctacgcccggaacacccacgcccggcacgccgacaccaggaacaccaacgcccggtacgcccacacctgggacacctacgcccggaacacccacgcccggcacgccgacaccaggaacaccaacgcccggtacgcccacacctgggacacctacgcccggaacacccacgcccggcacgccgacaccaggaacaccaacgcccggtacgcccacacctgggacacctacgcccggaacacccacgcccggcacgccgacaccaggaacaccaacgcccggtacgcccacacctgggacacctacgcccggaacacccacgcccggcacgccgacaccaggaacaccaacgcccggtacgcccacacctgggacacctacgcccggaacacccacgcccggcacgccgacaccangaacaccaacgcccggtacgcccacacctggg

SEQ ID NO: 140 - DNA, 720 bp, synthetic construct
  source 1..720: mol_type = other DNA
tagcccgggcagctggcttcatcgctgccatccagacaatcgcgatcgctatcgcaaacgaactggcggctgatgcatttgccatcatgacagcggaactcatcttggctgcacgtgccagggacgccaacacccggtacacccagacctggcacaccgacgcccggaacacccagccccggaacgcccacaccagggacgccaacacccggtacacccagacctggcacaccgacgcccggaacacccagccccggaacgcccacaccagggacgccaacacccggtacacccagacctggcacaccgacgcccggaacacccagccccggaacgcccacaccagggacgccaacacccggtacacccagacctggcacaccgacgcccggaacacccagccccggaacgcccacaccagggacgccaacacccggtacacccagacctggcacaccgacgcccggaacacccagccccggaacgcccacaccagggacgccaacacccggtacacccagacctggcacaccgacgcccggaacacccagccccggaacgcccacaccanggacgccaacacccggtacacccagacctggcacaccgacgcccggaacacccagccccggaacgcccacaccnngnacgccaacacccggtacacccagacctggcacaccgacgcccggaacacccagccccggaacgcccacaccn

SEQ ID NO: 141 - DNA, 809 bp, synthetic construct
  source 1..809: mol_type = other DNA
tagcccgggcagctggcttcatcgctgccatccagacaatcgcgatcgctatcgcaaacgaactggcggctgatgcatttgccatcatgacagcggaactcatcttggctgcacgtgcccggcacgccgacaccaggaacaccaacgcccggtacgcccacacctgggacacctacgcccggaacacccacgcccggcacgccgacaccaggaacaccaacgcccggtacgcccacacctgggacacctacgcccggaacacccacgcccggcacgccgacaccaggaacaccaacgcccggtacgcccacacctgggacacctacgcccggaacacccacgcccggcacgccgacaccaggaacaccaacgcccggtacgcccacacctgggacacctacgcccggaacacccacgcccggcacgccgacaccaggaacaccaacgcccggtacgcccacacctgggacacctacgcccggaacacccacgcccggcacgccgacaccaggaacaccaacgcccggtacgcccacacctgggacacctacgcccggaacacccacgcccggcacgccgacaccaggaacaccaacgcccggtacgcccacacctgggacacctacgcccggaacacccacgcccggcacgccgacaccangaacaccaacgcccggtacgcccacacctgggacacctacgcccggaacacccacgcccggcacgccgacaccangaacaccaacgcccggtacgcccacacctgggacacctacgcccggaacacccacgcccggcacgccgacacc

SEQ ID NO: 142 - DNA, 765 bp, synthetic construct
  source 1..765: mol_type = other DNA
tagcccgggcagctggcttcatcgctgccatccagacaatcgcgatcgctatcgcaaacgaactggcggctgatgcatttgccatcatgacagcggaactcatcttggctgcacgtgccaggaacacccacacctggaacgcctgctcctggaacacccacgcctggcactccggcgccaggaacacccacacctggaacgcctgctcctggaacacccacgcctggcactccggcgccaggaacacccacacctggaacgcctgctcctggaacacccacgcctggcactccggcgccaggaacacccacacctggaacgcctgctcctggaacacccacgcctggcactccggcgccaggaacacccacacctggaacgcctgctcctggaacacccacgcctggcactccggcgccaggaacacccacacctggaacgcctgctcctggaacacccacgcctggcactccggcgccaggaacacccacacctggaacgcctgctcctggaacacccacgcctggcactccggcgccaggaacacccacacctggaacgcctgctcctggaacacccacgcctggcactccggcgccaggaacacccacacctggaacgcctgctcctggaacacccacgcctggcactccggcgccaggaacacccacacctggaacgcctgctcctggaacacccacgcctggcactccggcgccaggaacacccacacctggnacgcctgctcctggaacacccacgcct

SEQ ID NO: 143 - protein, 100 aa, synthetic construct
  REPEAT 1..5: note = single repeat of (EAAAK)n, wherein n is an integer between 1 and 20
  VARIANT 6..100: note = up to 19 copies of (EAAAK) can be deleted
EAAAKEAAAKEAAAKEAAAKEAAAKEAAAKEAAAKEAAAKEAAAKEAAAKEAAAKEAAAKEAAAKEAAAKEAAAKEAAAKEAAAKEAAAKEAAAKEAAAK

SEQ ID NO: 144 - protein, 150 aa, synthetic construct
  REPEAT 1..5: note = single repeat of (GGGGS)n, wherein n is an integer between 1 and 30
  VARIANT 6..150: note = up to 29 copies of (GGGGS) can be deleted
GGGGSGGGGSGGGGSGGGGSGGGGSGGGGSGGGGSGGGGSGGGGSGGGGSGGGGSGGGGSGGGGSGGGGSGGGGSGGGGSGGGGSGGGGSGGGGSGGGGSGGGGSGGGGSGGGGSGGGGSGGGGSGGGGSGGGGSGGGGSGGGGSGGGGS

SEQ ID NO: 145 - protein, 200 aa, synthetic construct
  REPEAT 1..4: note = single repeat of (SGGG)n, wherein n is an integer between 1 and 50
  VARIANT 5..200: note = up to 49 copies of (SGGG) can be deleted
SGGGSGGGSGGGSGGGSGGGSGGGSGGGSGGGSGGGSGGGSGGGSGGGSGGGSGGGSGGGSGGGSGGGSGGGSGGGSGGGSGGGSGGGSGGGSGGGSGGGSGGGSGGGSGGGSGGGSGGGSGGGSGGGSGGGSGGGSGGGSGGGSGGGSGGGSGGGSGGGSGGGSGGGSGGGSGGGSGGGSGGGSGGGSGGGSGGGSGGG

SEQ ID NO: 146 - protein, 80 aa, synthetic construct
  REPEAT 1..4: note = single repeat of (GGGS)n, wherein n is an integer between 1 and 20
  VARIANT 5..80: note = up to 19 copies of (GGGS) can be deleted
GGGSGGGSGGGSGGGSGGGSGGGSGGGSGGGSGGGSGGGSGGGSGGGSGGGSGGGSGGGSGGGSGGGSGGGSGGGSGGGS

SEQ ID NO: 147 - protein, 18 aa, synthetic construct
KESGSVSSEQLAQFRSLD

SEQ ID NO: 148 - protein, 14 aa, synthetic construct
EGKSSGSGSESKST

SEQ ID NO: 149 - protein, 30 aa, synthetic construct
  REPEAT 1: note = single repeat of (G)n, wherein n is an integer between 1 and 30
  VARIANT 2..30: note = up to 29 copies of (G) can be deleted
GGGGGGGGGGGGGGGGGGGGGGGGGGGGGG

SEQ ID NO: 150 - protein, 12 aa, synthetic construct
GKSSGSGSESKS

SEQ ID NO: 151 - protein, 14 aa, synthetic construct
GSTSGSGKSSEGKG

SEQ ID NO: 152 - protein, 18 aa, synthetic construct
GSTSGSGKSSEGSGSTKG

SEQ ID NO: 153 - protein, 18 aa, synthetic construct
GSTSGSGKPGSGEGSTKG

SEQ ID NO: 154 - protein, 14 aa, synthetic construct
EGKSSGSGSESKEF

SEQ ID NO: 155 - protein, 5 aa, synthetic construct
SRSSG

SEQ ID NO: 156 - protein, 5 aa, synthetic construct
SGSSC

SEQ ID NO: 157 - protein, 18 aa, synthetic construct
EGRGSLLTCGDVEENPGP

SEQ ID NO: 158 - protein, 19 aa, synthetic construct
ATNFSLLKQAGDVEENPGP

SEQ ID NO: 159 - protein, 20 aa, synthetic construct
QCTNYALLKLAGDVESNPGP

SEQ ID NO: 160 - protein, 22 aa, synthetic construct
VKQTLNFDLLKLAGDVESNPGP

SEQ ID NO: 161 - protein, 21 aa, synthetic construct
GSGEGRGSLLTCGDVEENPGP

SEQ ID NO: 162 - protein, 22 aa, synthetic construct
GSGATNFSLLKQAGDVEENPGP

SEQ ID NO: 163 - protein, 23 aa, synthetic construct
GSGQCTNYALLKLAGDVESNPGP

SEQ ID NO: 164 - protein, 25 aa, synthetic construct
GSGVKQTLNFDLLKLAGDVESNPGP

SEQ ID NO: 165 - protein, 18 aa, synthetic construct
GGGGSGGSGGGGSGGRGS

SEQ ID NO: 166 - protein, 5 aa, synthetic construct
AAAAA

SEQ ID NO: 167 - protein, 10 aa, synthetic construct
AAAAAAAAAA

SEQ ID NO: 168 - protein, 11 aa, synthetic construct
AAAAAAGGGGG

SEQ ID NO: 169 - protein, 5 aa, synthetic construct
AGAGA

SEQ ID NO: 170 - protein, 6 aa, synthetic construct
EKAREK

SEQ ID NO: 171 - protein, 5 aa, synthetic construct
GAAGA

SEQ ID NO: 172 - protein, 6 aa, synthetic construct
GASGAS

SEQ ID NO: 173 - protein, 5 aa, synthetic construct
GEGEF

SEQ ID NO: 174 - protein, 5 aa, synthetic construct
GGGGS

SEQ ID NO: 175 - protein, 9 aa, synthetic construct
GGGGSGGGG

SEQ ID NO: 176 - protein, 10 aa, synthetic construct
GGGGSGGGGS

SEQ ID NO: 177 - protein, 14 aa, synthetic construct
GGGGSGGGGSGGGG

SEQ ID NO: 178 - protein, 15 aa, synthetic construct
GGGGSGGGGSGGGGS

SEQ ID NO: 179 - protein, 20 aa, synthetic construct
GGGGSGGGGSGGGGSGGGGS

SEQ ID NO: 180 - protein, 25 aa, synthetic construct
GGGGSGGGGSGGGGSGGGGSGGGGS

SEQ ID NO: 181 - protein, 11 aa, synthetic construct
GGGSGGGSGGG

SEQ ID NO: 182 - protein, 8 aa, synthetic construct
GGSGGSGG

SEQ ID NO: 183 - protein, 6 aa, synthetic construct
GGSGGS

SEQ ID NO: 184 - protein, 9 aa, synthetic construct
GGSGGSGGS

SEQ ID NO: 185 - protein, 12 aa, synthetic construct
GGSGGSGGSGGS

SEQ ID NO: 186 - protein, 6 aa, synthetic construct
GPGGPG

SEQ ID NO: 187 - protein, 5 aa, synthetic construct
GPGPG

SEQ ID NO: 188 - protein, 6 aa, synthetic construct
GPGPGP

SEQ ID NO: 189 - protein, 6 aa, synthetic construct
GPPGPP

SEQ ID NO: 190 - protein, 6 aa, synthetic construct
GPSGPG

SEQ ID NO: 191 - protein, 6 aa, synthetic construct
GPSGPS

SEQ ID NO: 192 - protein, 8 aa, synthetic construct
GPSGSGPG

SEQ ID NO: 193 - protein, 19 aa, synthetic construct
GSGGGGSGGGGSGGGGSGS

SEQ ID NO: 194 - protein, 14 aa, synthetic construct
GSGGGGSGGGGSGS

SEQ ID NO: 195 - protein, 9 aa, synthetic construct
GSGGGGSGS

SEQ ID NO: 196 - protein, 16 aa, synthetic construct
GSGGGSGGGSGGGSGS

SEQ ID NO: 197 - protein, 4 aa, synthetic construct
GSGS

SEQ ID NO: 198 - protein, 10 aa, synthetic construct
GSGSAGSGSA

SEQ ID NO: 199 - protein, 6 aa, synthetic construct
GSGSGS

SEQ ID NO: 200 - protein, 9 aa, synthetic construct
GSGSGSGSG

SEQ ID NO: 201 - protein, 4 aa, synthetic construct
GSSG

SEQ ID NO: 202 - protein, 8 aa, synthetic construct
GSSGGGGS

SEQ ID NO: 203 - protein, 10 aa, synthetic construct
KKKKKGGGGG

SEQ ID NO: 204 - protein, 5 aa, synthetic construct
PAPAP

SEQ ID NO: 205 - protein, 9 aa, synthetic construct
PGPGPGPGP

SEQ ID NO: 206 - protein, 6 aa, synthetic construct
QPGSGP

SEQ ID NO: 207 - protein, 8 aa, synthetic construct
SGAGSAGA

SEQ ID NO: 208 - protein, 6 aa, synthetic construct
SGGSGG

SEQ ID NO: 209 - protein, 9 aa, synthetic construct
SGGSGGSGG

SEQ ID NO: 210 - protein, 12 aa, synthetic construct
SGGSGGSGGSGG

SEQ ID NO: 211 - protein, 14 aa, synthetic construct
SGSGGSGGSGGSGG

SEQ ID NO: 212 - protein, 8 aa, synthetic construct
SGSGSGSG

SEQ ID NO: 213 - protein, 8 aa, synthetic construct
SSGSSGSS

SEQ ID NO: 214 - protein, 11 aa, synthetic construct
TGTGGSGSGTG

SEQ ID NO: 215 - protein, 10 aa, synthetic construct
TGTGGTGTGG

SEQ ID NO: 216 - protein, 14 aa, synthetic construct
YPKYVKQNTLKLAT

SEQ ID NO: 217 - protein, 2500 aa, synthetic construct
  REPEAT 1..5: note = single repeat of (VPGXG)n, wherein n is an integer between 1 and 500
  VARIANT 6..2500: note = up to 499 copies of (VPGXG) can be deleted
VPGXGVPGXGVPGXGVPGXGVPGXGVPGXGVPGXGVPGXGVPGXGVPGXGVPGXGVPGXGVPGXGVPGXGVPGXGVPGXGVPGXGVPGXGVPGXGVPGXGVPGXGVPGXGVPGXGVPGXGVPGXGVPGXGVPGXGVPGXGVPGXGVPGXGVPGXGVPGXGVPGXGVPGXGVPGXGVPGXGVPGXGVPGXGVPGXGVPGXGVPGXGVPGXGVPGXGVPGXGVPGXGVPGXGVPGXGVPGXGVPGXGVPGXGVPGXGVPGXGVPGXGVPGXGVPGXGVPGXGVPGXGVPGXGVPGXGVPGXGVPGXGVPGXGVPGXGVPGXGVPGXGVPGXGVPGXGVPGXGVPGXGVPGXGVPGXGVPGXGVPGXGVPGXGVPGXGVPGXGVPGXGVPGXGVPGXGVPGXGVPGXGVPGXGVPGXGVPGXGVPGXGVPGXGVPGXGVPGXGVPGXGVPGXGVPGXGVPGXGVPGXGVPGXGVPGXGVPGXGVPGXGVPGXGVPGXGVPGXGVPGXGVPGXGVPGXGVPGXGVPGXGVPGXGVPGXGVPGXGVPGXGVPGXGVPGXGVPGXGVPGXGVPGXGVPGXGVPGXGVPGXGVPGXGVPGXGVPGXGVPGXGVPGXGVPGXGVPGXGVPGXGVPGXGVPGXGVPGXGVPGXGVPGXGVPGXGVPGXGVPGXGVPGXGVPGXGVPGXGVPGXGVPGXGVPGXGVPGXGVPGXGVPGXGVPGXGVPGXGVPGXGVPGXGVPGXGVPGXGVPGXGVPGXGVPGXGVPGXGVPGXGVPGXGVPGXGVPGXGVPGXGVPGXGVPGXGVPGXGVPGXGVPGXGVPGXGVPGXGVPGXGVPGXGVPGXGVPGXGVPGXGVPGXGVPGXGVPGXGVPGXGVPGXGVPGXGVPGXGVPGXGVPGXGVPGXGVPGXGVPGXGVPGXGVPGXGVPGXGVPGXGVPGXGVPGXGVPGXGVPGXGVPGXGVPGXGVPGXGVPGXGVPGXGVPGXGVPGXGVPGXGVPGXGVPGXGVPGXGVPGXGVPGXGVPGXGVPGXGVPGXGVPGXGVPGXGVPGXGVPGXGVPGXGVPGXGVPGXGVPGXGVPGXGVPGXGVPGXGVPGXGVPGXGVPGXGVPGXGVPGXGVPGXGVPGXGVPGXGVPGXGVPGXGVPGXGVPGXGVPGXGVPGXGVPGXGVPGXGVPGXGVPGXGVPGXGVPGXGVPGXGVPGXGVPGXGVPGXGVPGXGVPGXGVPGXGVPGXGVPGXGVPGXGVPGXGVPGXGVPGXGVPGXGVPGXGVPGXGVPGXGVPGXGVPGXGVPGXGVPGXGVPGXGVPGXGVPGXGVPGXGVPGXGVPGXGVPGXGVPGXGVPGXGVPGXGVPGXGVPGXGVPGXGVPGXGVPGXGVPGXGVPGXGVPGXGVPGXGVPGXGVPGXGVPGXGVPGXGVPGXGVPGXGVPGXGVPGXGVPGXGVPGXGVPGXGVPGXGVPGXGVPGXGVPGXGVPGXGVPGXGVPGXGVPGXGVPGXGVPGXGVPGXGVPGXGVPGXGVPGXGVPGXGVPGXGVPGXGVPGXGVPGXGVPGXGVPGXGVPGXGVPGXGVPGXGVPGXGVPGXGVPGXGVPGXGVPGXGVPGXGVPGXGVPGXGVPGXGVPGXGVPGXGVPGXGVPGXGVPGXGVPGXGVPGXGVPGXGVPGXGVPGXGVPGXGVPGXGVPGXGVPGXGVPGXGVPGXGVPGXGVPGXGVPGXGVPGXGVPGXGVPGXGVPGXGVPGXGVPGXGVPGXGVPGXGVPGXGVPGXGVPGXGVPGXGVPGXGVPGXGVPGXGVPGXGVPGXGVPGXGVPGXGVPGXGVPGXGVPGXGVPGXGVPGXGVPGXGVPGXGVPGXGVPGXGVPGXGVPGXGVPGXGVPGXGVPGXGVPGXGVPGXGVPGXGVPGXGVPGXGVPGXGVPGXGVPGXGVPGXGVPGXGVPGXGVPGXGVPGXGVPGXGVPGXGVPGXGVPGXGVPGXGVPGXGVPGXGVPGXGVPGXGVPGXGVPGXGVPGXGVPGXGVPGXGVPGXGVPGXGVPGXGVPGXGVPGXGVPGXGVPGXGVPGXGVPGXGVPGXGVPGXGVPGXGVPGXGVPGXGVPGXGVPGXGVPGXGVPGXGVPGXGVPGXGVPGXGVPGXGVPGXGVPGXGVPGXGVPGXGVPGXGVPGXGVPGXGVPGXGVPGXGVPGXGVPGXGVPGXGVPGXGVPGXGVPGXGVPGXGVPGXGVPGXGVPGXGVPGXGVPGXGVPGXGVPGXGVPGXGVPGXGVPGXGVPGXGVPGXGVPGXGVPGXGVPGXGVPGXGVPGXGVPGXGVPGXGVPGXGVPGXGVPGXGVPGXGVPGXGVPGXGVPGXGVPGXGVPGXGVPGXGVPGXGVPGXGVPGXGVPGXGVPGXGVPGXGVPGXGVPGXGVPGXGVPGXGVPGXGVPGXGVPGXGVPGXGVPGXGVPGXGVPGXGVPGXGVPGXGVPGXGVPGXGVPGXGVPGXGVPGXGVPGXGVPGXGVPGXGVPGXGVPGXGVPGXGVPGXGVPGXGVPGXGVPGXG

SEQ ID NO: 218 - protein, 4 aa, synthetic construct
SKGP

SEQ ID NO: 219 - protein, 4 aa, synthetic construct
MSKP

SEQ ID NO: 220 - protein, 39 aa, synthetic construct
TCSQDEFRCHDGKCISRQFVCDSDRDCLDGSDEASCPGY

SEQ ID NO: 221-223 - skipped (3 entries)

SEQ ID NO: 224 - protein, 186 aa, Homo sapiens
GAIEDPELEAIKARVREMEEEAEKLKELQNEVEKQMNMSPPPGNAGPVIMSIEEKMEADARSIYVGNVDYGATAEELEAHFHGCGSVNRVTILCDKFSGHPKGFAYIEFSDKESVRTSLALDESLFRGRQIKVIPKRTNRPGISTTDRGFPRARYRARTTNYNSSRSRFYSGFNSRPRGRVYRGGY

SEQ ID NO: 225 - protein, 481 aa, synthetic construct
MSKGPGGVGVPGVGVPGVGVPGVGVPGVGVPGVGVPGVGVPGVGVPGVGVPGVGVPGVGVPGVGVPGVGVPGVGVPGVGVPGVGVPGVGVPGVGVPGVGVPGVGVPGVGVPGVGVPGVGVPGVGVPGVGVPGVGVPGVGVPGVGVPGVGVPGVGVPGVGVPGVGVPGVGVPGVGVPGVGVPGVGVPGVGVPGVGVPGVGVPGVGVPGVGVPGVGVPGVGVPGVGVPGVGVPGVGVPGVGVPGVGVPGVGVPGVGVPGVGVPGVGVPGVGVPGVGVPGVGVPGVGVPGVGVPGVGVPGVGVPGVGVPGVGVPGVGVPGVGVPGVGVPGVGVPGVGVPGVGVPGVGVPGVGVPGVGVPGVGVPGVGVPGVGVPGVGVPGVGVPGVGVPGVGVPGVGVPGVGVPGVGVPGYGGGSASGLEGKVKWFNSEKGFGFIEVEGQDDVFVHFSAIQGEGFKTLEEGQAVSFEIVEGNRGPQAANVTKEA

SEQ ID NO: 226 - protein, 480 aa, synthetic construct
SKGPGGVGVPGVGVPGVGVPGVGVPGVGVPGVGVPGVGVPGVGVPGVGVPGVGVPGVGVPGVGVPGVGVPGVGVPGVGVPGVGVPGVGVPGVGVPGVGVPGVGVPGVGVPGVGVPGVGVPGVGVPGVGVPGVGVPGVGVPGVGVPGVGVPGVGVPGVGVPGVGVPGVGVPGVGVPGVGVPGVGVPGVGVPGVGVPGVGVPGVGVPGVGVPGVGVPGVGVPGVGVPGVGVPGVGVPGVGVPGVGVPGVGVPGVGVPGVGVPGVGVPGVGVPGVGVPGVGVPGVGVPGVGVPGVGVPGVGVPGVGVPGVGVPGVGVPGVGVPGVGVPGVGVPGVGVPGVGVPGVGVPGVGVPGVGVPGVGVPGVGVPGVGVPGVGVPGVGVPGVGVPGVGVPGVGVPGVGVPGVGVPGYGGGSASGLEGKVKWFNSEKGFGFIEVEGQDDVFVHFSAIQGEGFKTLEEGQAVSFEIVEGNRGPQAANVTKEA

SEQ ID NO: 227 - DNA, 6780 bp, synthetic construct; identical to SEQ ID NO: 104
  source 1..6780: mol_type = other DNA

SEQ ID NO: 228 - DNA, 276 bp, synthetic construct
  source 1..276: mol_type = other DNA
gtgcgtaaaatcggagagctggttcgctaccttaataccaaccctgttggagggctgttggaatatgcgcgtagccacggcttcgctgctgagttcaaattggtggatcaaagtgggccgccccacgagccgaagtttgtctatcaagctaaggtggggggacgctggttcccggctgtctgtgcacactcgaaaaaacaaggtaaacaggaggcggcggacgcagctttacgtgttcttattggggagaatgagaaggcggagcgcggctactga

SEQ ID NO: 229 - DNA, 6696 bp, synthetic construct; identical to SEQ ID NO: 105
  source 1..6696: mol_type = other DNA

SEQ ID NO: 230 - DNA, 204 bp, synthetic construct
  source 1..204: mol_type = other DNA
ctagaaggaaaagtaaagtggtttaattcagagaagggtttcggcttcatcgaagtcgagggtcaagatgacgtgtttgttcactttagcgcgattcagggtgaaggcttcaaaacgctggaagagggccaagctgtgtcctttgagatcgtggagggcaaccgtggtccgcaggcggcaaatgttaccaaagaagccggctac

SEQ ID NO: 231 - DNA, 6744 bp, synthetic construct; identical to SEQ ID NO: 106
  source 1..6744: mol_type = other DNA

SEQ ID NO: 232 - DNA, 240 bp, synthetic construct
  source 1..240: mol_type = other DNA
ggcaaaaaggttattgcgactaaggtattgggtacggttaagtggttcaatgtccgcaacggttacgggttcattaaccgtaatgatacgaaagaggacgtattcgttcatcagacggccattaaaaaaaacaatccccgtaagtacctgcgctctgtaggcgatggtgagacagttgaatttgacgttgtcgagggggagaaaggcgcagaagctgcgaatgttacgggaccaggctac

SEQ ID NO: 233 - DNA, 7047 bp, synthetic construct; identical to SEQ ID NO: 107
  source 1..7047: mol_type = other DNA

SEQ ID NO: 234 - DNA, 552 bp, synthetic construct
  source 1..552: mol_type = other DNA
aaacatcctcttcagaatcgttgggcgctttggttttttaagaatgacaaatctaaaacatggcaagcgaatcttcgtctgatttcaaagtttgacacagtggaagatttttgggccctttataatcacatccaattaagctctaatctgatgccagggtgcgactatagcttgtttaaggacggtattgaacccatgtgggaagatgaaaagaacaaacgcggtggacgttggcttattactttgaataaacagcagcgtcgtagtgatttagatcgtttctggcttgaaacactgctgtgccttatcggtgaatcctttgacgactactctgacgacgtatgtggcgcagtagtaaacgtgcgtgccaaaggggacaagatcgcaatctggacaacggagtgcgagaatcgtgaagccgttactcacatcggtcgtgtctacaaggaacgcttggggttgccgccaaagattgttatcggctatcagagccacgctgatacagcaaccaaaagcggatcgaccacgaagaatcgttttgtagtgggctac

SEQ ID NO: 235 - DNA, 6798 bp, synthetic construct; identical to SEQ ID NO: 108
  source 1..6798: mol_type = other DNA

SEQ ID NO: 236 - DNA, 303 bp, synthetic construct
  source 1..303: mol_type = other DNA
aatactgagaataagtcgcaacctaaacgtttgcacgtatctaacattccgttccgctttcgtgatcctgatttacgccagatgttcggccagtttggtaagattttggatgtagaaattatttttaatgaacgtgggagcaagggatttggctttgtcacgtttgaaaactcagcagacgctgaccgtgctcgtgaaaaattacatggaactgtggtggagggtcgcaagatcgaagttaataatgccacggcgcgtgttatgacgaacaaaaagaccgtcaacccgtacactaatggctac

SEQ ID NO: 237 - DNA, 7296 bp, synthetic construct; identical to SEQ ID NO: 109
  source 1..7296: mol_type = other DNA

SEQ ID NO: 238 - DNA, 783 bp, synthetic construct; identical to SEQ ID NO: 124
  source 1..783: mol_type = other DNA

SEQ ID NO: 239 - DNA, 6969 bp, synthetic construct; identical to SEQ ID NO: 110
  source 1..6969: mol_type = other DNA

SEQ ID NO: 240 - DNA, 525 bp, synthetic construct
  source 1..525: mol_type = other DNA
agctacccaatggcgagcctgtatgtcggagaccttcaccctgatgttaccgaggccatgctgtatgagaaattcagcccagctggtccgatcctttccattcgcgtgtgccgcgatatgatcacacgtcgttcccttggttacgcctatgtaaattttcaacaaccagccgatgcagaacgcgccttggacactatgaatttcgatgtgattaagggtaaaccggttcgcattatgtggtcccaacgtgatccttcgcttcgcaagtctggggtagggaacatctttattaaaaatctggacaagtccattgataacaaagcattatatgataccttctcagcgttcgggaacattttatcctgtaaggttgtgtgcgacgaaaatggaagcaaaggctatggctttgtacattttgagacacaggaggcggcagagcgtgccattgaaaagatgaatggaatgttacttaatgaccgtaaggtgttcgtcggtcgttttaaatcgcgcaaggaacgcggctac

SEQ ID NO: 241 - DNA, 7032 bp, synthetic construct; identical to SEQ ID NO: 111
  source 1..7032: mol_type = other DNA

SEQ ID NO: 242 - DNA, 558 bp, synthetic construct
  source 1..558: mol_type = other DNA
ggagctatagaagatcccgaactagaggcaatcaaggcgcgcgtgagagaaatggaagaggaagccgagaagctgaaagagttgcaaaacgaagtggaaaagcagatgaatatgagtccgccgccaggcaacgccggtccggtcatcatgtctatcgaggaaaagatggaagctgatgcacgctctatctacgtgggtaacgtggattacggcgcgaccgcggaagagctggaagcgcattttcacggttgtggtagcgttaatcgtgttaccattctgtgcgataaattctccggtcacccgaaaggttttgcatatatcgaatttagcgacaaggagagcgttcgtacgagcctggcgctggacgagtccttgtttcgtggtcgtcagattaaagttattccgaaacgtacgaaccgtccgggtattagcaccactgaccgtggcttcccgcgtgcgcgctaccgcgctcgcaccaccaattataactccagccgcagccgtttctacagcggcttcaactcgagacctcgtggccgtgtctatcgtggcggctac

SEQ ID NO: 243 - DNA, 7077 bp, synthetic construct; identical to SEQ ID NO: 112
  source 1..7077: mol_type = other DNA

SEQ ID NO: 244 - DNA, 804 bp, synthetic construct
  source 1..804: mol_type = other DNA
ggaaattcagtaacatatagtactctaatatccggtctgggcaaggcgggtcgcctggaagaggcgctggaactgttcgaggaaatgaaggagaaaggcatcgtgccaacggttgtgacctacaccacactgatcaacggcctgggtaaagctgggaagcttgacgaagccttggaattgttcgaggaaatgaaagagaagggtctggttccgaatattgttacgtatacttctctgattaacggcctgggtaaggcaggtcgtgtggaagaggcgctggaattatttgatgagatgaaagaaagaggtgttgtgccgaacgtggtgacctttagcaccctaatcagcggttttgcacgtgcaggccgtttggaggaagcgctggaactgttcgaagagatgaaagaaaagggcatcgtgccgagcgttgtaacgtacaccaccctgattgacggtttatgcaaggctggcaagctggacgaggcgctgaaactgttcgaagagatggtagagaagggtatcaaaccgaacgtggtcacctataccaccctgatcgacggcttgggtcgtgctggcaaattagatgaggcgctcaaattgttcgaggaaatggtggagaaaggtatcaagccgaatgttgtcacgtactcgaccctgattgatggtctttgcaaagcgggtaagctggatgaagcgttgaagctgttcgaggaaatggtcgagaagggcattaaaccgaccgttgagttgacttaccgccgtgttgttgaaagctattgtcgtgccaaacgttttgaaggctac

SEQ ID NO: 245 - DNA, 7323 bp, synthetic construct; identical to SEQ ID NO: 113
  source 1..7323: mol_type = other DNA

SEQ ID NO: 246 - DNA, 1053 bp, synthetic construct
  source 1..1053: mol_type = other DNA
ggccgttcccgccttcttgaggattttcgtaataaccgttaccctaatttacagttacgtgaaattgcgggacacattatggagttctctcaggatcaacacggctcccgtttcatccaactgaaattggaacgtgcgacaccggctgaacgtcagttggtgttcaatgagattttacaggcagcttaccagttgatggttgatgttttcggggtcttcgtaatccagaaattctttgagttcgggtcgttagagcaaaagttggctttagcggagcgcattcgtggccatgttttgtcgttggctttgcagatgtatggtacacgtgtcatccaaaaagcacttgagttcattccatccgaccaacagaacgagatggttcgtgagttagatggccatgtactgaaatgcgtgaaggaccagaatggccgcggagtggtctacaaatgcatcgagtgtgtccagccccagtcattgcaattcatcattgatgcatttaagggtcaagtttttgccttgtccactcatccctatggtccacacgtcatccaacgtattttagagcattgcctgcccgaccagacattgccaatcttagaagaactgcatcaacacaccgaacaactggtgcaggatcagtatggggtgtgggtcattcatcatgtgcttgaacatggacgtccagaagacaagtccaagattgtggccgagatccgtgggaacgtattagttctgagccaacacaaattcgcaatgcacgtagtgcagaaatgtgtaacccatgccagtcgcactgaacgcgctgtattgatcgatgaggtttgcaccatgaatgatgggccccatagtgccttatacacgatgatgaaagaccaatatgctcaattggtggtgcgtaagatgattgacgtcgcggagcctggccaacgtaaaatcgttatgcataaaatccgcccccacatcgcaactttgcgtaagtatacatacggaaaacacatcttggccaagttagaaaaatactatatgaaaaacggggtagatttagggggctac

SEQ ID NO: 247 - DNA, 7572 bp, synthetic construct; identical to SEQ ID NO: 114
  source 1..7572: mol_type = other DNA

SEQ ID NO: 248 - DNA, 222 bp, synthetic construct
  source 1..222: mol_type = other DNA
gacaagaaatcacccatttcgcaggtacatgagatcggaattaaacgtaacatgacagtccactttaaggtgttacgcgaggaaggaccggctcacatgaagaacttcatcaccgcttgcatcgtaggttcaattgtaaccgagggtgaggggaacggaaagaaagtcagtaagaaacgtgcggctgagaagatgcttgtagagcttcaaaagttaggctac

SEQ ID NO: 249 - DNA, 6729 bp, synthetic construct; identical to SEQ ID NO: 115
  source 1..6729: mol_type = other DNA

SEQ ID NO: 250 - DNA, 225 bp, synthetic construct; identical to SEQ ID NO: 131
  source 1..225: mol_type = other DNA

SEQ ID NO: 251 - DNA, 6732 bp, synthetic construct; identical to SEQ ID NO: 116
  source 1..6732: mol_type = other DNA

SEQ ID NO: 252 - DNA, 213 bp, synthetic construct
  source 1..213: mol_type = other DNA
agcccgcagttttcgcagcagcgtgaggaagatatttatcgtttcttgaaagacaatggaccgcagcgtgctcttgtcatcgcgcaggcgctgggtatgcgcactgcgaaagatgtgaatcgcgacctgtaccgtatgaagtcgcgtcacttactggacatggacgagcagtcgaaagcatggaccatctaccgctggacgatttatggctac

SEQ ID NO: 253 - DNA, 6708 bp, synthetic construct; identical to SEQ ID NO: 117
  source 1..6708: mol_type = other DNA

SEQ ID NO: 254 - DNA, 456 bp, synthetic construct; identical to SEQ ID NO: 125
  source 1..456: mol_type = other DNA

SEQ ID NO: 255 - DNA, 6771 bp, synthetic construct; identical to SEQ ID NO: 118
  source 1..6771: mol_type = other DNA

SEQ ID NO: 256 - DNA, 264 bp, synthetic construct
  source 1..264: mol_type = other DNA
tacgtttgccactttgaaaattgcggtaaagcgtttaagaaacacaaccagcttaaagtacaccagttttctcacactcagcaacttccctatgagtgcccccatgaaggctgtgataaacgcttttcgctgccttctcgcttgaagcgtcacgagaaagtacatgcagggtatccctgtaagaaggatgacagttgcagcttcgtaggtaaaacttggaccctttacctgaaacacgtggcagagtgccatcaggatggctac

SEQ ID NO: 257 - DNA, 1215 bp, synthetic construct; identical to SEQ ID NO: 136
  source 1..1215: mol_type = other DNA

SEQ ID NO: 258 - DNA, 6720 bp, synthetic construct
  source 1..6720: mol_type = other DNA
taatacgactcactataggggaattgtgagcggataacaattcccctctagaaataattttgtttaactttaagaaggaggagtacatatgagcaaagggccgggaggcgtgggtgttccgggcgtaggtgtcccaggtgtgggcgtaccgggcgttggtgttcctggtgtcggcgtgccgggcgtgggtgttccgggcgtaggtgtcccaggtgtgggcgtaccgggcgttggtgttcctggtgtcggcgtgccgggcgtgggtgttccgggcgtaggtgtcccaggtgtgggcgtaccgggcgttggtgttcctggtgtcggcgtgccgggcgtgggtgttccgggcgtaggtgtcccaggtgtgggcgtaccgggcgttggtgttcctggtgtcggcgtgccgggcgtgggtgttccgggcgtaggtgtcccaggtgtgggcgtaccgggcgttggtgttcctggtgtcggcgtgccgggcgtgggtgttccgggcgtaggtgtcccaggtgtgggcgtaccgggcgttggtgttcctggtgtcggcgtgccgggcgtgggtgttccgggcgtaggtgtcccaggtgtgggcgtaccgggcgttggtgttcctggtgtcggcgtgccgggcgtgggtgttccgggcgtaggtgtcccaggtgtgggcgtaccgggcgttggtgttcctggtgtcggcgtgccgggcgtgggtgttccgggcgtaggtgtcccaggtgtgggcgtaccgggcgttggtgttcctggtgtcggcgtgccgggcgtgggtgttccgggcgtaggtgtcccaggtgtgggcgtaccgggcgttggtgttcctggtgtcggcgtgccgggcgtgggtgttccgggcgtaggtgtcccaggtgtgggcgtaccgggcgttggtgttcctggtgtcggcgtgccgggcgtgggtgttccgggcgtaggtgtcccaggtgtgggcgtaccgggcgttggtgttcctggtgtcggcgtgccgggcgtgggtgttccgggcgtaggtgtcccaggtgtgggcgtaccgggcgttggtgttcctggtgtcggcgtgccgggcgtgggtgttccgggcgtaggtgtcccaggtgtgggcgtaccgggcgttggtgttcctggtgtcggcgtgccgggcgtgggtgttccgggcgtaggtgtcccaggtgtgggcgtaccgggcgttggtgttcctggtgtcggcgtgccgggcgtgggtgttccgggcgtaggtgtcccaggtgtgggcgtaccgggcgttggtgttcctggtgtcggcgtgccgggctacggtgggggttcagcttcaggtctagaaggaaaagtaaagtggtttaattcagagaagggtttcggcttcatcgaagtcgagggtcaagatgacgtgtttgttcactttagcgcgattcagggtgaaggcttcaaaacgctggaagagggccaagctgtgtcctttgagatcgtggagggcaaccgtggtccgcaggcggcaaatgttaccaaagaagcctgataatgaggatccgagctccgtcgacaagcttgcggccgcactcgagcaccaccaccaccaccactgagatccggctgctaacaaagcccgaaaggaagctgagttggctgctgccaccgctgagcaataactagcataaccccttggggcctctaaacgggtcttgaggggttttttgctgaaaggaggaactatatccggattggcgaatgggacgcgccctgtagcggcgcattaagcgcggcgggtgtggtggttacgcgcagcgtgaccgctacacttgccagcgccctagcgcccgctcctttcgctttcttcccttcctttctcgccacgttcgccggctttccccgtcaagctctaaatcgggggctccctttagggttccgatttagtgctttacggcacctcgaccccaaaaaacttgattagggtgatggttcacgtagtgggccatcgccctgatagacggtttttcgccctttgacgttggagtccacgttctttaatagtggactcttgttccaaactggaacaacactcaaccctatctcggtctattcttttgatttataagggattttgccgatttcggcctattggttaaaaaatgagctgatttaacaaaaatttaacgcgaattttaacaaaatattaacgtttacaatttcaggtggcacttttcggggaaatgtgcgcggaacccctatttgtttatttttctaaatacattcaaatatgtatccgctcatgaattaattcttagaaaaactcatcgagcatcaaatgaaactgcaatttattcatatcaggattatcaataccatatttttgaaaaagccgtttctgtaatgaaggagaaaactcaccgaggcagttccataggatggcaagatcctggtatcggtctgcgattccgactcgtccaacatcaatacaacctattaatttcccctcgtcaaaaataaggttatcaagtgagaaatcaccatgagtgacgactgaatccggtgagaatggcaaaagtttatgcatttctttccagacttgttcaacaggccagccattacgctcgtcatcaaaatcactcgcatcaaccaaaccgttattcattcgtgattgcgcctgagcgagacgaaatacgcgatcgctgttaaaaggacaattacaaacaggaatcgaatgcaaccggcgcaggaacactgccagcgcatcaacaatattttcacctgaatcaggatattcttctaatacctggaatgctgttttcccggggatcgcagtggtgagtaaccatgcatcatcaggagtacggataaaatgcttgatggtcggaagaggcataaattccgtcagccagtttagtctgaccatctcatctgtaacatcattggcaacgctacctttgccatgtttcagaaacaactctggcgcatcgggcttcccatacaatcgatagattgtcgcacctgattgcccgacattatcgcgagcccatttatacccatataaatcagcatccatgttggaatttaatcgcggcctagagcaagacgtttcccgttgaatatggctcataacaccccttgtattactgtttatgtaagcagacagttttattgttcatgaccaaaatcccttaacgtgagttttcgttccactgagcgtcagaccccgtagaaaagatcaaaggatcttcttgagatcctttttttctgcgcgtaatctgctgcttgcaaacaaaaaaaccaccgctaccagcggtggtttgtttgccggatcaagagctaccaactctttttccgaaggtaactggcttcagcagagcgcagataccaaatactgtccttctagtgtagccgtagttaggccaccacttcaagaactctgtagcaccgcctacatacctcgctctgctaatcctgttaccagtggctgctgccagtggcgataagtcgtgtcttaccgggttggactcaagacgatagttaccggataaggcgcagcggtcgggctgaacggggggttcgtgcacacagcccagcttggagcgaacgacctacaccgaactgagatacctacagcgtgagctatgagaaagcgccacgcttcccgaagggagaaaggcggacaggtatccggtaagcggcagggtcggaacaggagagcgcacgagggagcttccagggggaaacgcctggtatctttatagtcctgtcgggtttcgccacctctgacttgagcgtcgatttttgtgatgctcgtcaggggggcggagcctatggaaaaacgccagcaacgcggcctttttacggttcctggccttttgctggccttttgctcacatgttctttcctgcgttatcccctgattctgtggataaccgtattaccgcctttgagtgagctgataccgctcgccgcagccgaacgaccgagcgcagcgagtcagtgagcgaggaagcggaagagcgcctgatgcggtattttctccttacgcatctgtgcggtatttcacaccgcatatatggtgcactctcagtacaatctgctctgatgccgcatagttaagccagtatacactccgctatcgctacgtgactgggtcatggctgcgccccgacacccgccaacacccgctgacgcgccctgacgggcttgtctgctcccggcatccgcttacagacaagctgtgaccgtctccgggagctgcatgtgtcagaggttttcaccgtcatcaccgaaacgcgcgaggcagctgcggtaaagctcatcagcgtggtcgtgaagcgattcacagatgtctgcctgttcatccgcgtccagctcgttgagtttctccagaagcgttaatgtctggcttctgataaagcgggccatgttaagggcggttttttcctgtttggtcactgatgcctccgtgtaagggggatttctgttcatgggggtaatgataccgatgaaacgagagaggatgctcacgatacgggttactgatgatgaacatgcccggttactggaacgttgtgagggtaaacaactggcggtatggatgcggcgggaccagagaaaaatcactcagggtcaatgccagcgcttcgttaatacagatgtaggtgttccacagggtagccagcagcatcctgcgatgcagatccggaacataatggtgcagggcgctgacttccgcgtttccagactttacgaaacacggaaaccgaagaccattcatgttgttgctcaggtcgcagacgttttgcagcagcagtcgcttcacgttcgctcgcgtatcggtgattcattctgctaaccagtaaggcaaccccgccagcctagccgggtcctcaacgacaggagcacgatcatgcgcacccgtggggccgccatgccggcgataatggcctgcttctcgccgaaacgtttggtggcgggaccagtgacgaaggcttgagcgagggcgtgcaagattccgaataccgcaagcgacaggccgatcatcgtcgcgctccagcgaaagcggtcctcgccgaaaatgacccagagcgctgccggcacctgtcctacgagttgcatgataaagaagacagtcataagtgcggcgacgatagtcatgccccgcgcccaccggaaggagctgactgggttgaaggctctcaagggcatcggtcgagatcccggtgcctaatgagtgagctaacttacattaattgcgttgcgctcactgcccgctttccagtcgggaaacctgtcgtgccagctgcattaatgaatcggccaacgcgcggggagaggcggtttgcgtattgggcgccagggtggtttttcttttcaccagtgagacgggcaacagctgattgcccttcaccgcctggccctgagagagttgcagcaagcggtccacgctggtttgccccagcaggcgaaaatcctgtttgatggtggttaacggcgggatataacatgagctgtcttcggtatcgtcgtatcccactaccgagatatccgcaccaacgcgcagcccggactcggtaatggcgcgcattgcgcccagcgccatctgatcgttggcaaccagcatcgcagtgggaacgatgccctcattcagcatttgcatggtttgttgaaaaccggacatggcactccagtcgccttcccgttccgctatcggctgaatttgattgcgagtgagatatttatgccagccagccagacgcagacgcgccgagacagaacttaatgggcccgctaacagcgcgatttgctggtgacccaatgcgaccagatgctccacgcccagtcgcgtaccgtcttcatgggagaaaataatactgttgatgggtgtctggtcagagacatcaagaaataacgccggaacattagtgcaggcagcttccacagcaatggcatcctggtcatccagcggatagttaatgatcagcccactgacgcgttgcgcgagaagattgtgcaccgccgctttacaggcttcgacgccgcttcgttctaccatcgacaccaccacgctggcacccagttgatcggcgcgagatttaatcgccgcgacaatttgcgacggcgcgtgcagggccagactggaggtggcaacgccaatcagcaacgactgtttgcccgccagttgttgtgccacgcggttgggaatgtaattcagctccgccatcgccgcttccactttttcccgcgttttcgcagaaacgtggctggcctggttcaccacgcgggaaacggtctgataagagacaccggcatactctgcgacatcgtataacgttactggtttcacattcaccaccctgaattgactctcttccgggcgctatcatgccataccgcgaaaggttttgcgccattcgatggtgtccgggatctcgacgctctcccttatgcgactcctgcattaggaagcagcccagtagtaggttgaggccgttgagcaccgccgccgcaaggaatggtgcatgcaaggagatggcgcccaacagtcccccggccacggggcctgccaccatacccacgccgaaacaagcgctcatgagcccgaagtggcgagcccgatcttccccatcggtgatgtcggcgatataggcgccagcaaccgcacctgtggcgccggtgatgccggccacgatgcgtccggcgtagaggatcgagatctcgatcccgcgaaat

SEQ ID NO: 259 - DNA, 6720 bp, synthetic construct; identical to SEQ ID NO: 258
  source 1..6720: mol_type = other DNA

SEQ ID NO: 260 - protein, 9 aa, synthetic construct
GYGGGSASG

SEQ ID NO: 261 - protein, 9 aa, synthetic construct
GYGGGSASG

SEQ ID NO: 262 - protein, 403 aa, synthetic construct
MGVGVPGVGVPGAGVPGVGVPGVGVPGVGVPGVGVPGAGVPGVGVPGVGVPGVGVPGVGVPGAGVPGVGVPGVGVPGVGVPGVGVPGAGVPGVGVPGVGVPGVGVPGVGVPGAGVPGVGVPGVGVPGVGVPGVGVPGAGVPGVGVPGVGVPGVGVPGVGVPGAGVPGVGVPGVGVPGVGVPGVGVPGAGVPGVGVPGVGVPGVGVPGVGVPGAGVPGVGVPGVGVPGVGVPGVGVPGAGVPGVGVPGVGVPGVGVPGVGVPGAGVPGVGVPGVGVPGVGVPGVGVPGAGVPGVGVPGVGVPGVGVPGVGVPGAGVPGVGVPGVGVPGVGVPGVGVPGAGVPGVGVPGVGVPGVGVPGVGVPGAGVPGVGVPGVGVPGVGVPGVGVPGAGVPGVGVPGVGVPGY

SEQ ID NO: 263 - protein, 405 aa, synthetic construct
MGAGVPGVGVPGAGVPGVGVPGAGVPGVGVPGAGVPGVGVPGAGVPGVGVPGAGVPGVGVPGAGVPGVGVPGAGVPGVGVPGAGVPGVGVPGAGVPGVGVPGAGVPGVGVPGAGVPGVGVPGAGVPGVGVPGAGVPGVGVPGAGVPGVGVPGAGVPGVGVPGAGVPGVGVPGAGVPGVGVPGAGVPGVGVPGAGVPGVGVPGAGVPGVGVPGGAGVPGVGVPGAGVPGVGVPGAGVPGVGVPGAGVPGVGVPGAGVPGVGVPGAGVPGVGVPGAGVPGVGVPGAGVPGVGVPGAGVPGVGVPGAGVPGVGVPGAGVPGVGVPGAGVPGVGVPGAGVPGVGVPGAGVPGVGVPGAGVPGVGVPGAGVPGVGVPGAGVPGVGVPGAGVPGVGVPGAGVPGVGVPGWP

SEQ ID NO: 264 - protein, 407 aa, synthetic construct
MSKGPGGVGVPGLGVPGVGVPGLGVPGVGVPGVGVPGLGVPGVGVPGLGVPGVGVPGVGVPGLGVPGVGVPGLGVPGVGVPGVGVPGLGVPGVGVPGLGVPGVGVPGVGVPGLGVPGVGVPGLGVPGVGVPGVGVPGLGVPGVGVPGLGVPGVGVPGVGVPGLGVPGVGVPGLGVPGVGVPGVGVPGLGVPGVGVPGLGVPGVGVPGVGVPGLGVPGVGVPGLGVPGVGVPGVGVPGLGVPGVGVPGLGVPGVGVPGVGVPGLGVPGVGVPGLGVPGVGVPGVGVPGLGVPGVGVPGLGVPGVGVPGVGVPGLGVPGVGVPGLGVPGVGVPGVGVPGLGVPGVGVPGLGVPGVGVPGVGVPGLGVPGVGVPGLGVPGVGVPGVGVPGLGVPGVGVPGLGVPGVGVPG
